(19) United States
(12) Patent Application Publication
(10) Pub. No.: US 2019/0183130 A1
(43) Pub. Date: Jun. 20, 2019

(54) BIOFUMIGANT

(71) Applicant: ARCIS BIOTECHNOLOGY HOLDINGS LIMITED, Warrington (GB)

(72) Inventor: Anthony BARKER, Sleaford (GB)

(21) Appl. No.: 16/318,780

(22) PCT Filed: Jul. 17, 2017
(86) PCT No.: PCT/GB2017/052100

§ 371 Date: Jan. 18, 2019

(30) Foreign Application Priority Data
Jul. 18, 2016 (GB) 1612424.0
Nov. 17, 2016 (GB) 1619489.6

(51) Int. Cl. A01N 63/04; A01N 47/46; C09K 17/14

(52) U.S. Cl. CPC A01N 63/04; C12Y 302/01147; C09K 17/14; A01N 47/46

(57) ABSTRACT

A method of treating soil, the method comprising providing the soil with a glucosinolate-secreting plant or a source thereof and contacting said soil with a myrosinase-secreting yeast of the x or a source thereof.

[0001] The present invention relates to the field of biofumigants, more specifically the field of biofumigants for targeting crop diseases in solanacae species, for example, tomatoes and potatoes. In particular the present invention relates to biofumigants for the treatment of soil borne pathogens in agricultural and horticultural crops.

[0002] An example of soil borne pathogens are Plant Parasitic Nematodes, PPN. PPN are a pest that cause disease of the roots in many crop species. The problem leads to wide scale crop failure every year, with a significant economic impact. Current methods of tackling PPN are expensive, damaging to the environment, and have become increasingly ineffective.

[0003] Traditional pesticides such as fosthiazate are currently the standard treatment for addressing soil borne pathogens such as PPN. However application of fosthiazate and similar pesticides for bacteria and fungi borne pathogens is strictly controlled and the effectiveness is very dependent on soil conditions. Under some conditions, for example high temperature or higher soil pH, the pesticide can be degraded in as little as under ten days. Furthermore, such pesticides are likely to become obsolete in the near future due to the ever stricter regulations on the application of chemicals to soils and to plant products intended for consumption.

[0004] Alternative chemical solutions have been suggested. One example is the application of biocides to effectively disinfect soil of any microorganisms. However, although this is effective in the short term, only the top soil is cleared of microorganisms. In the longer term, microorganisms from the deeper layers of soil migrate up into the top soil and re-establish communities. Typically, it is the pathogenic microorganisms that establish the communities first, rendering the top soil more infective than before the biocide was applied.

[0005] The use of biological solutions has increased in recent years. One such solution is biofumigation. Biofumigation typically involves the generation of a natural biocide/pesticide from a sacrificial crop which is then macerated into the soil to release the biocide/pesticide and prepare the soil for the growth of the intended crop. For most soil pathogens including PPN, isothiocyanate compounds are effective biofumigants. The precursor chemicals glucosinolates are naturally produced by a series of plants together with myrosinase enzymes as a defence mechanism. When these plants are eaten or otherwise crushed, the cells release the glucosinolates and myrosinases, which then combine such that the myrosinases catalyse the conversion of glucosinolates into isothiocyanates.

[0006] However, a disadvantage of these biofumigation methods is that significant time and money is invested to plant a sacrificial crop which provides no revenue and is incorporated into a field before the desired crop can be grown. Furthermore, like any other chemical added to soil, the effectiveness of the naturally released isothiocyanates diminishes after a number of days depending on the weather conditions.

[0007] It is an object of at least one or more aspects of the present invention to address one or more of the above-mentioned disadvantages in the prior art.

[0008] It is a further object of the invention to provide an alternative source of myrosinase.

[0009] According to a first aspect of the present invention, there is provided a method of treating soil, the method comprising providing the soil with a glucosinolate-secreting plant or a source thereof and contacting said soil with a myrosinase-secreting yeast of the Cryptococcous genus or a source thereof.

[0010] According to a second aspect of the present invention, there is provided the use of a combination of a myrosinase-secreting Cryptococcus yeast or a source thereof, and a glucosinolate-secreting plant or a source thereof for treating soil.

[0011] According to a third aspect of the present invention, there is provided a kit for treating soil, the kit comprising a glucosinolate-secreting plant or a source thereof, and a myrosinase-secreting Cryptococcus yeast or a source thereof.

[0012] According to fourth aspect of the present invention there is provided the use of a yeast of the Cryptococcus genus to provide myrosinase.

[0013] Preferred features of the first, second, third and fourth aspects of the invention will now be described. Any feature of any aspect may apply to any other aspect as appropriate.

[0014] In the method of the first aspect of the present invention the soil treated is provided with a glucosinolate and a myrosinase. These suitably interact to produce an isothiocyanate. This isothiocyanate is suitably the active biocidal/pesticidal species, i.e. the biofumigant.

[0015] Advantageously, the use of a plant-yeast system to generate the biofumigant instead of destroying the natural cellular plant system means that the plants themselves do not have to be destroyed by macerating or incorporation into the field in order to provide the soil with biofumigant. Since the plant secretes the precursor chemical glucosinolates, external yeasts can provide the enzyme myrosinases to convert the precursors to the biofumigant outside the plant. This allows the farmer to use the biofumigant crop as a product and potentially generate revenue therefrom in addition to the increased revenue from the now healthy intended crop. Furthermore, the biofumigant crop can be grown together with the intended crop by intercropping or other such techniques, thereby generating the biofumigant in the soil continuously throughout the growing period of the intended crop. This avoids any tapering off of the biofumigant levels and maintains the soil at a certain level of biofumigant which avoids the return of any pests or disease, and allows the farmer more flexibility due to less dependency on soil conditions and weather.

[0016] The method of the first aspect of the present invention is suitably a biofumigation method.

[0017] Suitably, the biofumigant is an isothiocyanate. The isothiocyanate produced will typically depend on the glucosinolate secreted from the plant and the particular myrosinase enzyme secreted from the Cryptococcus yeast. The specific glucosinolate product will usually depend on the particular species of plant. The myrosinase produced will depend on the specific species of microorganism.

[0018] The method of the present invention relies on the presence of myrosinase and glucosinolates in the soil. If a soil is already rich in one of these components the invention may involve introducing the other component into the soil.

[0019] According to a fifth aspect of the present invention, there is provided the use of a myrosinase-secreting yeast of the Cryptococcus genus for treating soil wherein the soil comprises a source of glucosinolates.

[0020] According to a sixth aspect of the present invention, there is provided a use of a glucosinolate-secreting plant for treating soil wherein the soil comprises a yeast of the Cryptococcus genus which secretes myrosinases.

[0021] The present invention suitably provides an isothiocyanate in the soil. In some preferred embodiments the isothiocyanate is selected from one or more optionally substituted aryl, allyl or alkyl isothiocyanate, more preferably a C1-C10 alkyl, allyl or aryl isothiocyanate, most preferably, benzyl isothiocyanate, isopropyl isothiocyanate, methyl isothiocyanate, 1-napthyl isothiocyanate, 2-phenylethyl isothiocyanate, phenyl isothiocyanate, propyl isothiocyanate or similar.

[0022] Optionally, the aspects of the invention may comprise more than one plant, and/or more than one Cryptococcus yeast. Accordingly, any references herein to the plant, or a Cryptococcus yeast include one or more plants and one or more yeasts.

[0023] The present invention involves a glucosinolate-secreting plant or a source thereof. This may suitably be a plant or a seed. Preferably the plant is a crop plant or a seed thereof. Any references to a plant herein include the seed thereof as appropriate.

[0024] Preferably the plant is of the order Brassicales. Preferably the plant is of the family Brassicaceae. Still more preferably the plant is of the genera Brassica or Raphanus. More preferably the plant is selected from one of the following species Brassica balearica, Brassica carinata, Brassica elongata, Brassica fruticulosa, Brassica hilarionis, Brassica juncea, Brassica napus, Brassica narinosa, Brassica nigra, Brassica oleracea, Brassica perviridis, Brassica rupestris, Brassica rapa, Brassica septiceps, Brassica toumefortii, Raphanus sativa, Raphanus caudatus, Raphanus confusus or Raphanus raphanistrum. Still more Preferably the plant is of the species Brassica oleracea, Brassica juncea, Brassica alba, or Raphanus sativus. Most preferably the plant is of the species Brassica alba, Brassica juncea, or Raphanus sativus. Preferably the glucosinolate secreted from the plant is selected from one of the following: gluconasturtin, glucobrassicin, glucoalyssin, glucoraphanin, progoitrin, or sinigrin. More preferably the glucosinolate is sinigrin.

[0025] The method of the first aspect of the invention involves providing the soil with a glucosinolate secreting plant.

[0026] Suitably, providing the soil with a glucosinolate-secreting plant may include growing said plant in the soil, or distributing the seed of said plant in or on the soil by such processes as planting, spreading or drilling etc.

[0027] Optionally, the method may further comprise the step of inducing the secretion of glucosinolate from the plant and/or inducing the secretion of myrosinase from the Cryptococcus yeast. Optionally this inducement may comprise contacting the plant and/or Cryptococcus yeast with an inducing chemical such as an inducing hormone or pheromone or metabolic agent, for example the application of the messenger protein ‘harpin’ or the application of methyl jasmonate to the foliage. Alternatively, the inducement may comprise causing physical damage to plant cells, stimulation of the immune system or other methods of causing the plant stress.

[0028] The present invention involves contracting the soil with a myrosinase-secreting yeast of the Cryptococcus genus or a source thereof.

[0029] The source of myrosinases may be a Cryptococcus yeast or a spore thereof. Preferably the yeast is a soil borne Cryptococcus yeast or a spore thereof. Accordingly, any references to a Cryptococcus herein include the spores thereof.

[0030] The yeast used in the present invention is of the Cryptococcus genus. Preferably the yeast is selected from one of the following species: Cryptococcus neoformans, Cryptococcus gatti, Cryptococcus albidus, Cryptococcus uniguttulatus, Cryptococcus macerans, Cryptococcus oierensis, Cryptococcus adeliensis, Cryptococcus aerius, Cryptococcus albidosimilis, Cryptococcus antarcticus, Cryptococcus aquaticus, Cryptococcus ater, Cryptococcus bhutanensis, Cryptococcus consortionis, Cryptococcus curvatus, Cryptococcus phenolicus, Cryptococcus skinneri, Cryptococcus terreus and Cryptococcus vishniacci.

[0031] Preferably the mryosinase-secreting yeast is selected from Cryptococcus macerans, Cryptococcus oierensis and mixtures thereof. In some embodiments the myrosinase-secreting yeast comprises Cryptococcus macerans. In some embodiments the myrosinase-secreting yeast comprises Cryptococcus oierensis.

[0032] The present inventors have isolated two particular strains of yeast which are effective at secreting myrosinase and can be used in the present invention. These are identified in SEQUENCE ID 1 and SEQUENCE ID 2 filed herewith.

[0033] In some embodiments the myrosinase secreting yeast has the SEQUENCE ID 1.

[0034] In some embodiments the myrosinase secreting yeast has the SEQUENCE ID 2.

[0035] Suitably the amount of myrosinase-secreting Cryptococcus yeast contacted with the soil is an amount necessary to produce the effective amount of myrosinase relative to the amount of glucosinolate secreted by the plants.

[0036] The method of the first aspect of the invention involves contacting the soil with a myrosinase-secreting Cryptococcus yeast.

[0037] Suitably, contacting the soil with a myrosinase-secreting yeast may include spreading said yeast on the soil, or depositing said yeast in the soil by such processes as spraying, ploughing or any other methods of incorporating into the soil. Preferably contacting the soil with a myrosinase-secreting yeast includes contacting the soil in the vicinity of a glucosinolate-secreting plant, more preferably in the vicinity of a root of a glucosinolate-secreting plant, still more preferably in the rhizosphere and/or rhizoplane of a root of a glucosinolate-secreting plant, most preferably on the root of a glucosinolate-secreting plant.

[0038] In one embodiment the Cryptococcus yeast may be coated onto a seed of the plant.

[0039] Thus, according to a seventh aspect of the present invention, there is provided a seed of a glucosinolate-secreting plant comprising a coating, wherein the coating comprises a myrosinase-secreting Cryptococcus yeast or a source thereof.

[0040] Preferably the seed comprises a coating in which the myrosinase-secreting yeast is trapped or encased. Preferably the coating is formed from an aqueous solution in which the microorganism is suitably suspended. Preferably the aqueous solution comprises one or more polymers. Preferably the polymers are adhesion promoting polymers such as, for example, carboxymethylcellulose (CMC).

[0041] Suitably, the coating is applied to the seed by spraying, dipping, immersion, painting or any other appropriate method.

[0042] In one embodiment, the present invention relates to one plant and one Cryptococcus yeast, which suitably each secrete one glucosinolate and one myrosinase respectively. Preferably the plant is Brassica oleracae, more preferably a cultivar of Purple Sprouting broccoli (Redhead), and the yeast is selected from Cryptococcus macerans and Cryptococcus oierensis. Preferably the glucosinolate is an alkyl glucosinolate. Examples of alkyl glucosinolates include sinigrin. Advantageously, purple sprouting broccoli is a high value crop in itself that can be grown for the purposes of revenue and also for the purposes of soil treatment according to the present invention, effectively performing both functions at once. Advantageously, Cryptococcus macerans and Cryptococcus oierensis are yeasts which are easy to culture in bulk in a laboratory environment and which grows naturally in soil. Therefore the yeasts can be produced easily and has survive well when transferred into the soil for the treatment.

[0043] Alternatively, other pairings of plants and yeasts, or glucosinolates and myrosinases may be appropriate. Other suitable embodiments of one plant and one microorganism include: Sinapsis alba and Cryptococcus macerans; Sinapsis alba and Cryptococcus oierensis; and Brassica juncea and Cryptococcus macerans; and Brassica juncea and Cryptococcus oierensis.

[0044] Preferably the soil treatment is for the benefit of crop plants, more preferably for crop plants at risk of loss from soil borne pathogens, still more preferably crops of the order Solanales, still more preferably for crop plants of the family Solanaceae, preferably for crop plants from the genus Solanum. Most preferably the soil treatment is for crop plants selected from the following species Solanum tuberosum and/or Solanum lycopersicum.

[0045] Thus the present invention may provide a method of improving the yield of a crop plant, the method comprising treating soil in which the crop plant is to be grown according to the method of the first aspect.

[0046] Suitably the method of the present invention provides a method of combatting a pathogenic infection in the soil. Suitably the method combats an infection of one or more pathogenic microorganisms, preferably pathogenic nematodes, more preferably cyst nematodes, most preferably potato cyst nematodes of the genus Globodera, for example the species Globodera rostochiensis and Globodera pallida.

[0047] By combatting pathogens we mean to refer to killing some or all of the pathogens present in the soil, or preventing the growth of the number of pathogens in the soil, reducing infection, reducing activity of the pest or acting as an antifeedant and/or repellent towards the pathogen. Suitably combatting pathogens reduces the number of pathogens in the soil.

[0048] Preferably the treatment method of the first aspect reduces the concentration of pathogens in the soil. Suitably it reduces the concentration of pathogenic microorganisms in the soil. Preferably it reduces the concentration of pathogenic nematodes in the soil. More preferably it reduces the concentration of potato cyst nematodes in the soil.

[0049] Preferably the treatment of the soil reduces the concentration of pathogenic microorganisms in the soil by at least 5%, preferably by at least 10%, suitably at least 15%, more preferably by at least 20%, still more preferably 25%. It may reduce the concentration of the pathogenic microorganisms in the soil by at least 30%, suitably at least 50%, for example at least 60%, at least 70%, or at least 80%.

[0050] Preferably the treatment of the soil reduces the concentration of pathogenic microorganisms in the soil to below the commercial economic damage threshold.

[0051] The reduction of pathogens using traditional biofumigation methods in which a sacrificial crop is macerated in to the soil may be from 10% to 70%. The present invention provides a reduction in pathogens within this range. In some embodiments the method of the present invention also provides the glucosinolate-secreting plant as a commercially viable crop. However even when intended as a sacrificial crop, the present invention provides advantages over the prior art. This is because the biofumigant is produced in the soil during the growing phase of the glucosinolate-secreting plant. Unlike traditional biofumigation methods in which the crop is mulched into the soil, there is no need to wait until at least 50% of the crop has flowered.

[0052] Any of the aspects contained herein may be combined with any of the preferred embodiments contained herein in any workable combination.

[0053] The invention will now be further explained by way of example only with reference to the following examples and accompanying figures in which:

### EXAMPLE 1

[0054] The effectiveness of various microorganisms at degrading sinigrin was tested. The tested organisms included different types of bacteria and fungi, including yeasts. Sinigrin is a glucosinolate expressed by some plants of the Brassicaceace family.

[0055] The tests were carried out using sinigrin-barium agar plates.

[0056] Microorganisms were tested in 5 mM sinigrin media, both with and without glucose. This was to investigate whether myrosinase secretion would be maintained in the presence of another carbon source.

[0057] The sinigrin concentration was measured after 1 day using a spectrophotometer @ 227.5 nm.

[0058] The most effective organisms were identified by DNA extraction and next generation sequencing using known techniques.

[0059] The two most promising species were found to be yeasts and their genomes are provided in the attached sequence listings. These are believed to be novel species and have been deposited with the National Collection of Yeast Cultures.

[0060] SEQUENCE ID 1 is believed to be a yeast of the Cryptococcus macerans species.

[0061] SEQUENCE ID 2 is believed to be a yeast of the Cryptococcus oierenis species.

### EXAMPLE 2

[0062] The effectiveness at degrading sinigrin of the yeasts of Sequence ID 1 and Sequence ID 2 is shown in table 1, compared with the effectiveness of some bacteria and fungi.

TABLE 1

| | | | Microorganism | | | |
|---|---|---|---|---|---|---|
| Temperature | | Glucose | Pseudomonas | Paecilomyces | SEQ ID 1 | SEQ ID 2 |
| (° C.) | pH | present? | mM singrin degraded per day | | | |
| 4 | 7 | Y | 0.002119 | 0.0059233 | 0.068774 | 0.050274 |
| 10 | 7 | Y | | 0.03737 | 0.0428455 | 0.069025 |
| 10 | 7 | N | | 0.0366505 | 0.0782975 | 0.072742 |
| 20 | 7 | Y | 0.020295 | 0.021389 | 0.130728 | 0.309697 |
| 20 | 7 | N | 0.026905 | 0.041608 | 0.195898 | 0.141093 |
| 4 | 5.8 | Y | 0.026156 | 0.011059 | 0.075355 | 0.105971 |
| 10 | 5.8 | Y | | 0.0383695 | 0.1166665 | 0.116347 |
| 10 | 5.8 | N | | 0.013629 | 0.1508395 | 0.078537 |
| 20 | 5.8 | Y | 0.01432 | 0.0269786 | 0.21814 | 0.140887 |
| 20 | 5.8 | N | 0.036319 | 0.070273 | 0.253426 | 0.199889 |
| 4 | 8 | Y | | 0.01219 | 0.1306555 | 0.0796165 |
| 10 | 8 | Y | | 0.005955 | 0.1333335 | 0.126299 |
| 20 | 8 | Y | | 0.02494 | 0.3205435 | 0.123701 |
| 20 | 8 | N | | 0.056155 | 0.276512 | 0.155096 |

### EXAMPLE 3

[0063] Tests were carried out to check that seeds coated with the Cryptococcus yeasts of the invention were able to germinate.

[0064] Seeds were sprayed twice with an inoculm comprising a yeast of SEQUENCE ID 1 or SEQUENCE ID 2.

[0065] Once dried seeds were sown in 50 ml falcon tubes containing 35 ml of John Innes No. 2 compost and stored at 20° C.

[0066] The percentage of seeds that had germinated was counted after 10 days. The results are shown in FIG. 1.

### EXAMPLE 4

[0067] Molecular analysis experiments were carried out to determine the presence of yeasts of SEQ ID1 and SEQ ID2.

[0068] Roots from 4 seed treated Brassicas were extracted from soil and stored in ethanol.

[0069] The presence of the yeasts of SEQ ID1 and SEQ ID2 was confirmed using Real-Time PCR protocols.

### EXAMPLE 5

[0070] Root-Microbe interactions were studied by the following method.

[0071] Roots of plants grown from seeds treated with yeasts of SEQ ID 1 and SEQ ID 2 were checked for presence of these yeasts after 10 days of growth.

[0072] The roots were plated onto agar plates to examine growth of microbes.

[0073] The presence or absence of microbes was determined and the microbes identified using colony morophologies and real time PCR for SEQ ID1 and SEQ ID2.

[0074] FIG. 2 shows the percentage of the roots of different types of Brassica seedlings which had the yeasts present.

[0075] Biological Deposits

[0076] The application refers to the following indications of deposited biological material:
[0077] Name: National Collection of Yeast Cultures
[0078] Address: National Collection of Yeast Cultures,
   [0079] Institute of Food Research,
   [0080] Norwich Research Park,
   [0081] Norwich,
   [0082] Norfolk,
   [0083] NR4 7UA,
   [0084] United Kingdom
[0085] Date: 10 Aug. 2016
[0086] Accession Number: NCYC 4134, NCYC 4135
[0087] Depositor: Arcis Biotechnology

The application's sequence listing, which the Patent Office published only in electronic form, follows.

SEQUENCE LISTING (2 sequences)

SEQ ID NO: 1 - DNA, 19352526 bp, Cryptococcus macerans (residues 1-1,935,253 of 19,352,526)
gaagtgcgacagcagctcgcgccacttgatctcgtcgccggcggcggcggcgctcgtgggtcctcctccggtgaccgctgaggtgagcttggagcgcgtgggcagggccgaggagccgttcgagtaggtcctgaagcccagccgtgggtgagagcaacacgcaagcaggtcagcgggcggcgggttaggagtggcgcgttgaagggggagggagagggggggctcgacggacggtttcggaatgtggaggaagcccatcgacgagacggcgctcagccgattccggagcgagacaaaggccgtgctctgcgggaggagcatcaggaggccttaaagacgggagagagggcgtttcagcagcgcaggacccgcgaggcttgattggagggcgagagacaagcctgaccgtagaggcacttgaacagatgggggtaccgctcgggctcgagcagctgcaggcggagggctgggacgcatgatgagcggtcgggtcagacctttgagtgagcgaagctcggccggaagggggggggcagacgaacaggtgaagacaggcgactcgatcagctggacgagcttgtcaatctggacgagcagctgaacagtgatgtcgaggtcggcgctggaaaagagtgcagcgaatgcgtgtcagtagcccgtccctgaagcctcgcgggcaacaaacgacgtacaagaggtggaggagatttgacgcgtgctcgtacgcctgggcgagtagacagagcgcaaagacggcgacgggcgagtggcaccacgagcggtagatgatggagaagagcatctggccgtcctttgagtcgaggttcttgagccgcttgcggaaatcttgaagctcgtcggacgtgatgaggatgatgttgagcctgaatcagcgcctcgatcggtcagcgtcagagtggcgaagaagagggagaaacggcccgacttttggaccatgctcgccgcaaactcgaggtcctcctcgcgctcgagaatctcggccagcgtccggtagatacgctcggcattcaggtcgaggcacagctggcggatgatgaggcttccccgggtctcgagcagccgccggtcggtgctgaagagttcgagcaggttgaccatgaacgaggtgaagtacgagtcgtccgatgacgacgaaatctgggcgagtagctggaggtcgcacttaatgacctcggacgacgggtccgacaggcacttgagcaggacggggaacgtgccgtcgtccatcgcgaggatctgaggcaacgacaggtaggtcagcgtaggcaagtgattcaggccgccagggcgaccaaccttcttcggcgccttgtgctggagcatgatgagccattcgagcgcggcgatccgcgtgtcctcatactcgctcaggaactggagcgtgaggacgttgacggtcgcctggtagtcaaacgggtcgtcctcagccatcgatgccaggccgaccgagacggacgggatcgacgggaacgaaaaagtgctgggcgtgatcggcagcggctggaggatcgagccgagcgttgaggtcgaggctttcgagccgtgcgtcgggccgtcaggcgctggtccgtttgagcccgggcccgacgagaggtcacggcccctgatggtcgaggtcgacgaagccaggcccgagctgccgacgtccctctgcgccgcttcactcgcgtctggggtttgggcgctgttgcgctgtccggctgaagctcccgatgcagcgacagccggcggcggtggaaatccgtgcgataaatgggcgtcggacgccgacgtcggtgactgaaacgtgttggtcgtcggactcggcgaaggcagtgacttgattagccggtagagattgatgttggtatcgcctgccgccgtttgaattgccgcaaacgggtgggcgagattcggcaaaatggccggaatgagcgccggcgtcaatggaatcatgacctcctgggcaaagacgatgaactcggagagccagtgcaggaccgtctcctggatgatctcgtctgcgcagcgagggatgggtcagccgcagggtaaagtcggcgagcgggaagagcgacgcactcggataagcgacgtgtcgcaagaggatctcgacaatctcttcgtagtggacggcgacaccctggccggggatccagctcccgctgcccttaccctcccactcctcctcgcgctcatcctccggcaggacctcctcgggctcctcgacgagccggtcccggtcgtcgccgttgttccggccatatgacgagctcatcgtcagcttgctctcgctccgcttgacgccgctgctgcctaggccagaaccgccgctgccggcgagcacgcgcgcccggcgctcttcggctagttgcttctgaacgcgagcaatgtcacggatctcgcgcagaaagtcggcgagcacgttctcggtcgcgacccggacgtcgatgttgtcttccgcgagatacttcctgcgagccagtcgagtcagtcagccaacgttgcgaagctagccgagctcaaccgacgcacagcaggccgtcgaggaaggaaggcaggtaggtgatgagctcgagctcaggcaccgagtcgaggacagtgatccagctgacaagatggttgcgcgtcttgggcgagatgacgtagatgcgctcagcgagcaacgggatgaagcgctctaggaagacgggcggcgagcggatcgacgagctcgaactcgcggcgtcagaggcagagtggaggttcgccgaagagccagagtgggacgggtaggtcgagaccgagtcgcagaccgtctggcagggaggcacgcgaagctcttgtcagtggtcggaggcgccaattcagaatacacacatcgcgcgacgacgtacatcttttaaaaggcggtcgagcagctcggcgccgtttcggacgacgatgtcgctgtcggtcgagagcttcagcgtatccccacgagatcaaggtcagcgaaggccaattcaggacgaggctgatcaagaggttgagggccgtacgcgattcaggccatcgaagatctcgttaaagtaccagagcatcggctcgcgtgcgaccttgccgctggcgggtggtaagcataggtcagccacatgtcagccctaggctcagcgaactagataagagacgcacatgttgtactgcggggatgggcggccgacagggcgagagggatcgatcagcttgcgcgccgctcggctcaacgagcgggcctgcctctgatggcaccgggcaggaagtgctgaacgtacgacacactcgaccgcaaagtagcggatccggttgtccggatcagcgaagcactcgagcacgggctcgatgatgcggccaaagtaggggacaatctcctcgccgagggcgatggccgccccggcgagagcgagcaggccgccgttgcgcgaggtcgacgtgttctcggtcgacaggagcccacgtgactggtcaatgatctgcgtgatccgagcctggtcggtcggcagcgtcgacgtgaggcactgtcgtaggagccgctggaggtcaagcgccgccgacttgcgggtgtcgtactggcgagaggaggaaggggaagggcgaggtcgtcagggctaggggctcgggtcgacacactgctggattgcttcgagaatctcaccttgacattgttctgtagtggagatgtccgagggctgatcagcagcttgtcatgaggccgagagggagcatcaactgacgaggcctttgaagatggaagggtctgctcggagagagaggggagcagcagccgcttgcctgtcagcccatcgcgagctccgccagcacacagaatcaagggcgctcacccatgatggcgatctgacttgccactcgagtctccagacctacacgagcgcctgctgatggggaaagatggaggtagagaggagaggagcggcgacgggccttcgagctgcttcgcgggcctttgctgctgcgctcgccgtcgtgcaccgctcgctctgaccgccgtcgagcccgacctgttgtcgactgccggctcgtctcaacggccatcgtctagagacccttctgtgcctttgccccgacaaggctgccatctgctcgcggcccagaagcgaggagggccggccgcaggttgcttccgctaggtcgcttgctgccctgccctcctctcctcggagtcgggcccgtcctgtaccggctccgaccgtcccctgtctgacggcaggcctggttcgggtagaccacctccagctgctctgactcttttcctgacatctttcggttccggtgctgaccttacaataagctcggaggggctgcctgtcgtctcagacagccttcgggctataattgtccatcctgactcgccctttctcgcttgcccaaacacatcagcgctggagcgcagtctgctctgcctctcgctaccgtctgcccggacccgggcggcaggccatcgtcatgactgtgcagactgcggcgcttcgccctgccctcagtcaaggacaaaaaggcggaggagccgagggcgaggaagacaaccgttccttcacctcatcctttgatcatcttcgtcctgcctccctccgcacagaccgcactcgaacccgccatcaacaccatgccctccttcttcggccgcaagttctcaaccgcctacaagccgtcgctcgtcgccgccattgaggagcgccgccagcgccaagccgccgccaaccctccctcgttcgacgactttgtcgactgcctcccgccgccggcctacggacctcgtcgtattgtcgtccgcgaccagaccgaaccgaactacgctgtgcttcatgcccgccttctcgccactgcaaagcgcggatgaatgagagtcggccctgtacctcaacctctcgcacccaacggagcagaggtcagccctaccggctctgatctccacctctcacctcctgacattgtccgtcgaccctggcgatcagctcacctcgcatactcaaccggcctcgccgaagccggtctctcgaccgtcaactggagccctaccttgccgccgacgccactgctgccgccgtcactgccctacaccgcaacgcaccgcgccgcactatcgccgctcgcatgtctgcatccgttgcagtctcagtgccctccttcggccctcgatccgtcgagggccaacatccggtggtgccagccgacgtctggcgatcccgacccgtcggcaagatgcgcgtcagcccggcctgctttcttgtagacctcgttcagccctcgcctcgcctccccttcttccatcggcctcgtctcttgcttgcccgatccttttgagatattgaagcgccttcatatgataccccgggcggcctccatgatccgccggagcttgacaaacttgctgtcggccgcgcccgagcagcttgcggcccggtcgaccgagacgggcgtctcgacgacaaagacgtcgtcatcgtcggacggctcgcgcggccgcttgctgcggctgttgctgttcagctctagtggtgacgttgtttggggcggcttggcaacgacactcggccgcaagggagtcgccatgtcgccgctgcagaaatcacattgagcgttggtcagcaaagagcgacgagactcatcgaccagcagggccactcactcgatgcggtgattgatggcagagggctgcagcgcctgcctttcggcatggccgatccggacgagctccgactcgacgtcgttgatgtactcggcaaagccctctgcggcctcatcgatcccgcgtgggtcgccaaacctgcgctcgggcacgggcggcagagcctcgagccgcgacgaggtcgatgcaaagagggcctcaaagaaagctcggagcggaggggctgcgaggtcggtagctggtcagtcggcggcagcctgccagcagatcgagatgcgaggccactgaccgaaaccgccgtagtaggcccggcggacgtcgccccgcagcgggccaaaggcaaagtcatcgacaaagcgcgacaggtcgaggtacttgagaagcgctgacgcgagcgacctgttgtccggaagcgagcacgggggtgggtcagcgcccgcagccaatgaggatgaaaagtggctagcctggactgacgtctgatcgctgatgggggatgccggcgcaaagtgcggtaggtagagctcgtcggcctcgcgctgcgtcgacgacacagcagcgacgatccgcgcagagtggtcgttgagggcggcgagcagcttgtcgatcacgctcaccagcgaaggcgaggctggagcggaagacagcggggtgggtcagcggcaggccagcgcacacaaagggagcggggagcgagcgggagccgacgcaccgagactcaagtggtcgacgaggtcgaggccgaggctgagaagagcctcgtaggtcggctgaagggccgcaatgtaggctgagcgagggcacaagtgagacgtcagcgatgatgtacggatctgcaagagaagcggacgagggcgacgcacagcggacggcgaggaggggctgctcaatcttggccgggatgcgaacaaaagtctggacggcggcggcgaacgcgtcgtctgcctcggccgtgtcgaggacgagtaggtggtgttcgggtgtatcggacctgctgagcatgcgcgactaagttcatgtcgagggtcacgtgtaagcaggggttgccgcgaagggatcgcaaggtggctcaaggagacgaacgaagagtggcgggaggtcggccgtccagccgacgacgagcagcgcgggcttatagtcgttgtcctctgagatcgctgcaagcacgtccgtcaggcgttgaacatcttcctcgtcgctggtcggcctaggatcgcagcagcctgtcagcgatcgtccttcgtggcaaccctttcgagagaaggtactcacgccgagggagggctgcactcgaagatgacgagcgccacctcctgcgaacccgccatggcggtcggctcgccaatcctgagctggacgcctcggccgcggacgctgtcagaactctgccggcccttcttgatgccgagcttagaggcgagccacgagccggcgttggacgctgtccagagcggcacagtcgatagcaggacgtcaaaagggaccggcggcggcaattgatcggccggcgtgccctcctgcttgaccgccaggacggagaggtgatcgagaagcgtgtagagaaaggtcgactgctcccagaaggccgctcgcgatttgccgagctggacgaagggggggggggtccccggggcagaggcagtcagtgctgcggttcgagctagacgaccttcctcgaggacgcacctcggcaatcctgttgtctgtcgctctatagtccacgttgcggccgagagcgggcgacctctcgagccgtggcgccggcgagacaaccaaggacgatggcgcatcgactcgagcaacactccgaccgaggcccatatcggccaccttgagctggaattgggcttcacgctcgcgccggtcgcggccgaggaggacagcctcccacatggcagcgagcgcgcgacgcttgagcccgcgctcgtagacgtcgtacgcgagctcggcctgcgaccttcgaatcgcagcagcctcctcggccgcctctgcgagccgacgctgacgctcgagctcaaacgcctctctctcacgctcgcgtgcgagatcttccgcctcgagccggtcgatgagctcctgcgagagcacgcgcgagcagacggaccggatggccaagctcgtcgcgagcgcgataagctcgtcggccaggctgcgcgcgagccgggcgttgagcgtcagctcgccagccagctgacgcgggcggggctctcgaggtggagggagcggttccaggacggtcggcgccgccattgagtggacggctgcggccgggaatgctgtcggaggcggggtcgccgccgcgcttgatggagggtcggaaggcgaggcgacgaggatctcctggaagcgacggggcggctcccggcctttgcccttctgggcagcggtcaaacccggagtgatcgatgttgctgaaggggcactgaatgcaaatgggttttcgcaagcggcagccgctggaggagccgggaaagacggagacggggccggggccagattcgacggctggctggccgcaaaggcggtccttggcgccgacagcgcgaccgggggcggtggggcaggagtcggttggggtgtcggcgccggggaggcaaaggcagaagcggtcggtgtcgggaacgagaagtcagccggcgtacccgtcccgctgcgcggggacagtgacggctgtctgctcgtcgctcgagaggaagaccgcgttgagccgggtccatcggcgtcgcccagcagagcggtcgaggcccgtgtagagccctcgacctgcatgctgccgccgaagccaaacgcgctgatcgaaggcgacgagtgaccagtcgtgctctggcgcgacgagcgagtcgacccagctggtggagcggaagcggtcgacgccaggccgttgatgatgtcgaggttggaccagcctgtggcttttgcgccgacgacgcggcgcgaggtccgaaggtggaaggcctggcggttgtctgaaggacgaaagattggggctcagtcctgccgaacggttcccagatcgctgtccataacgcaccggtgatgaccgtctccttgctcagccggacaccatcctcgccgagctcgacgccaaagtcaccaatcagcctgcgcaagtcggtctcgtcgtctgcgccaagcaagcggacgaggtcgtcgactgggaccggcttgtggttgccgagaaaggccttccgcatgccgcctagcgccgctttcctgacctcgccgaaatgaccctcgacgagcgcgccgacgaggtagggtgtgctcggccggccgacaaccttaaagaagcgcgaaaagaaattctgcgagagctcagacgttggcttggacttagcctgggcgtcgtgcgctcgctgggcgaggtaggcgagctcgagcgcgagctggacctcggtcgaatggaagaggtagggtgggagcgactcagtctgacggagaatgtcggtgtcgaagaggtgcgtcaagagcaggtacgccgagaactcggcctcgtgcggcgaagcggaggccggcgggtcgaacgaggtcgaggtcgagggggtcgcgtttcggacgtcggtgtagaactggatgagcgacgtgaggactgcaagggcggaatgggagtttgtgtcagcgtggaagctcgcaatgccggcgcgactcctccgcccacgcactcttccgcagctgctccatctcctgttggacgctgaagccctcctcttcgccgagcgcgtgcaggcaatggatgtggtagcgggccatgcgctcgtggcactcgatggcaattgcgccctttgagctctggatcgtaaagtcttgccggatcgcccgcgtccggtcgcggacgaagccatggcttgggcggagcgcagccggcgggccagccggcgggaagagcgtgaagaggtagtcgagcgagcggcggagggcgtcgggcgtccggacgtcagagggcagaggctgctcgttgcccgccgccggccggtggtacatcttgaccgccttagcgtggtcgattcggttggtcgtgccctcgagctgcaggacaaagggagcgctccttgtcagctgccggacttcaggcagactggaaagatgggaacgcacgagctcccaccggtcgacgttgaactgagcctcgcgctcctcaatctcaaactcgggacacatgccttcgcacgttcccacaaaggcctttgcctttgcgttgagctggcgcggtacagaggggtcgtcgatcgctccagagcgcatcgcgtcgccacgctccttgccgcgtagcttgcggagctgcaagacgaaggcgatgagagcaaaggtcagtctagccggtcgaagtgacgactctcggcgcggaggggcgcagcggccggtccggcgccgagcattaagggggaccgacctcgtcgaagcggtttccctcgaacttgctcgtaaagcgctggagccgagcgtccgccttgccggactttgactcgtccgtgtcctcggccggcgggccttcgaacccttcgatgaggtcactgccgccgtcgtcgccatcgtcgtctccgagtgcgccggcgagctcgagcgcgttcgcacggccaccgccacgaccgccgcctccgcctcggccacctcgagcgttgcctcggatcccgcgcactgctccactgcctctccctcgcgagccgttgccagcgatgccggctgagccagaggcggcggacgacgacggagggacggccgcgccggccgcgttgaagacgaccgactggttgcgggcagctgggccggacgtcccgccgccgcgagtccactggcgcgagctcccgcccggcggacgagacggcagggccgacatgggggcttgcagctgtgagaaaggaaagcaaacgatggagagggagagctgaggtgagggcgtcaatgagcgcaagatggcagtagcgcggcctcagcctcgtgcgcgcccttgggcccggccctctcgtcctgcatcgccaaatgtgaggcggcccgcagcatccctcccctcccggctttgctccggctctctctctctcttgccaaccgctcttgctcttcacccagccacgccgcactctttactcccaacgagcccatccctctctcaaccttcatctggccaccctcctactcgcctcgctcctggcccttttgcatagctcacggggatgacgtcctaccagcccgcgccgatcctcaagccgccgccgccggccgcctcgcagcggacgcccgagtcgcgccactggaggcgctaccgccagccgacgtacgtcaaggcctttgcgccggtgacgcacgtccagtttgcgcccaaccggcctcatcggctcgccgtcacggccggggccgaggtcaagctctatgcgcccaggaccaacaaggtcgtcaagacggtcacccgcttcaaggagacggcccgcggcggcgaggtacgccgggatggcaacctgctcgtcgccggcgacgactcgggtctcgtccaggtgcgtgccgaacaagctatctgggtgtcgggttcgagaggaactcgaggggtttgcgcgacgacgagacgcgagtaaggctgacctctggccgaccggctctcgcgcaggtcttcaacctcaactcgcgcgagatcctgaagcagattcgggtccacgagcagtgagtatgagagcagttgattggtggagctcgagctgacgcctgacaatctctcccgcgcaggccgacgcatgcgacggcctggtcgccgcactcgccctcgcagctcctctcggcatcggacgacacgtcgctcgcgctgcacgacctgacgtcgccgacgcccgttacgactttcatgggccacaccgactatgtccggacggcggcctttttgccttcatcgccgcacctcatcctctcgggctcgtacgacgcgaccgtccggctctgggacacgcggacgggcgaagccgaaattaccatgtcgcacgccggctatgcggtcgagtcggtcctaccctacccgcagggcggcctcgtcctctcatccggtgggccgctcctccgggcgtttgatctcgccaacccaagcaagccgctgcgatccctgtcgaaccaccagaagacgatcacctcgctcgcgtttacgtcgtcgggctcgcgcctgctctcgggctcgctcgaccagatggtcaaggtctgggacgtcagctcgtttaaggtcgtccacacgatgcgctactcggccccggtcctctcggtcgccatctcgcccgacgacacgcacctcgcctgcggcctggccgactcgaccctctcggtccggcagcgcaagcccctcaagaatggccgggtcgacgagggcttccaggccgacgacacgcccatgaatccgtcgacgtacacgtcgttcctctcggccggcgccgacctcggcgacctgttcacgaaggccgagacggctcgcaagcgcgacctgacgcgcggcgtcgcgccaaagggcgagcagggcgagctcatcgtcaaggacaacgtccgaatcggcgaaaagggcaaggggcccaagaagctccgcgtctacgaccggttccttaaggagttccgctacggcgccgcgctcgacgccgccctcgctccggtctgtcgcgtgttgctggccaaagtttaaccttccttgtcgctgactccctttccccttctctctacaggatatccctccgacgacgaccttctcgctcctcgccgagctctcgtcgcgggacgggctccggatcgccctttctggccgcgatgcccacgcgctcacgcccgtcctcgccttcctcctgaagcacctaacccacacgcatttcggcccgctcgcgagccaagcgacgctcgtcgcgctcgacctgtacggcgccgtcgtcggccagtcgcccgaggttgacgacctgctcgagcgcatgctcgtcaaggtcgacaatgagctccggatggagcgtgacgtcctgctcggcgtccagggcatgctcgacatggtcctcagcaacagtgtcgtcggcttagcccgggcgagggccggcgcaaagggcctccttggcgtcgattcgggcgtccaggcggaggtgtagatctatgtcgtctcgacaaagcttgacgccaagggcgctggatcgaggtaaaggggcagcgctacggtgtgtgacaaggtcgatcggtaggagagcccaaacaccgtccttcttgtctcccttcctcgcgccggacagctctcctctcgtcgtctccctccatgctcgtccacggcaccagtgtcttacctctttgagtcttgaccctttgttcggctccacgcatccacagtcggcgtcgcccactgttctccgtcctttctcgcacgacagccccccttgtctctacccgctgcccgccccgcatccgtcggtcgtgtgaggatcaagtatacccagaggaggatcgaatgccgcgcgagacgagcagagcgaggggaatgacagacaaggggctcgtgagcgaggatgaggggcggagcgctacggcgaaggcaggggcaaaaggggagaaagagagaaggcagacgcaagagagggagggtcgaagagagggatgtcgtcgaatgaaaagggagcggaagaggtgtcgatcaggcgctgaccggcccgctggtgggcgagctggccatacttccgctgccgctgtgatcattctcgagcgcggccccaccgccagctacagcggtcggcgacgggccgtcgaccgattcgctgccagaccgaccgccctcccacgccgccagaccggccttcccgccggcaccggcaccgagccgccgctgctgttcctgctgctgctgcctcagctcgtcctggacccgcccgagcccgcgctgggcgctcatctggagctcgccgacgcgcgagcggagcgtctccatctcacgctcgatctcgctcggccggcggggaggagacgatgggcgggaggagaaggacgacgaggaggaaccccctccagcaccgccggtcgggtcgagaggcgggcgctcgttgactggcaagcttgctggcacggcagagccgtgtgggctcgcattctgctcggccagcgagagaaaagacgtcggtgtcgctgaaggctgctgcgaacggcccgatgctgagcccggcaagcccgagatgggccggtgcgagccttccggctgctgctgatgcccagaaaagcccgcggccgcctggccaaagctctggacggcagggtgcgtctcgacgagtccctgaacgagccgctggcggggcaggacgtggccgtctttgctcgggggcgagcgttgataggggtgctggctgctcgagccgctcgcgctcgcactgccgcttccgagccgctgaccgggcgactgccagctaggcggcgtccgggtccctcggtgatggtgacggagccggtcgtcgtcctcgtcgttggctgcggcggacgacgacgatggcgggagaggtggcatgtaagccggcggagaggagctggcgaggccgaccggccgctggatcggcgtcgcatcgctcgccgggatgatctcgcactacgaggagaccgtggaggcaggggcgtcagtcttgatggtccggcaagggacactcgctaaggcaaagaaggcgacgcacggcgctataagcaaagaagcagttggagcacgagccatggccctcttggccgggccacgagcactcgaccttgtagtcgtggcagcgcttgcagattggcgtcggccggctgcgatggagagacgcgagtcagcttcagtctccagcgagggcggcgcgaggcgcaagagcagagggcgacttacgccggcagctcgccgtctccgtcgtcgtccgtcagcatgtcgacgatgccctccctcgcatccgtcatcttccacacctcccagtcctcctcgttcggcatctcgacctcgtcgagcaccggcggcccgtcgtagattgggtagacggccggcgcgggcgaggtcggcgtcgcgtggtacggctgaaggagggccgtcgccggatgccgggccgagggcgagaagggcgaggggagcgggagcggcaggggcgctttgaagccaaaagggacggacgggccctggagcgggacgagggtgcgcgtagacatgaaggtcagcctactggatatgccttagagagtcagagtctgaagggccggacgtgaacgacgaggttctgaggtgtaaagtcgggcggcgcccagaggtcctcctctccacctccacctccaggcccgcccagtccgctggccagagagccgtacccgccgtcgccgttcgacggctcgcgaatgacgaccggcgggctctgctggtgctgctgcggacgtggagggtaggaggggtgctgctgatgacgcggatgctggtagggatgaggatggtgctggtgttggtgctgctgctgctgctgatggtgagagtagctgccgttggacacggggtgataggacgacgggccggcttgcctgttgacgtgcgacgccgggccgtcatagccatacggctgcgagtcgtaggcatgctgcggtggtggtggcggcgggacgtaagccgcggtgtaagcggcccctgtctgctgctgctgctgagcaggaggcggctgtccttgctgatgggggtagcccgcctgtggatgaccgtacgcggcgccggtcgacatgcgctcagagtggctgtactcgaacgcaaagctcgacggcggggtcggcggcaagggcgagtcggcggcgctgctgacggccgagaaagagccgggcgagagggcgtggtcgggccctgtggtggcaaacgacgacgacgacgactggccgcgatagggagccggcgggtgatggcggcggccgtcgtcgtcaaaggtcgcggtcgggcagggagacgaccaggcggcggcggtgtcgtcggccgtgggctgatgacgacgcgacggcggcggcggcgccgagggaggaggagcggaagtgaggtcgctcgccggacggaggaagctcatgaagcgtctcctgacggagggggtagttggctggctggctggattggcaggagctggagctagggctgaaggtgggggctgcgggcgggcttgtgctctgtgcgtctctccgtccgatggtgaaggagcgagccagcatccaagccgggaccgcatcgaacggagggagaggccgaccggccgtgacagccgtgacgcaggcgtaactcgcactcacgcgcctgacttcgcaacacggcgcgccggcgcgcgcatcagccacaacactcggcctacctgccacctttctacatccatccatccgccgctgccagaccctcctccctcacgcacgattaggcctgagcgcacatccatgttccactcgggctactcgaccaatgtccgtccatccagccacagcccaggaaccgacggccttccctctccctcgagcagcaagctgaccgaccccctcctcctcctctgtggcccttgcgcagacaaagtcggtcccgacctacggccgccgaggcaaggctgtcgtccgcgtccaccgcgacgtcgtcgcctcgcccgcaccgtcgccgctccccaagccgccccagagggcagcgtcggtcgtcgtcccgccgttcgcacttgacggcaagaccgcccagaccgactacgacgacgaggaagatgcggagctcgcgacgaccccactcgcatcgcccatcaagccggtccatcgcgccctcaagcagatcgccgccggcggcggatccggcaggagctcgccctttggctcgccgctccgtcggccgtccgccctggctgacaagacgcgccggctccggccagtgatgggcactcaggctgttattagctcaaaggagacgcgcgagcagtggacggacgacgaagcggctgggcatgagcaggacgaaaatgtccctctgaaggcaacgaccgcgggcgccaacaaggccagcaagtcgaagtccggtggtctcgcgccgagcaagtcgagtgtcgtcgtcgtcgacaagggcgccgccggcgggaaggcagaggtcgcgcctggctcgctggtgggagctcgccggccgttgacccgccggtcgacgaaggtcggcggacggccggccggcctcccgcgggagacgtcgctcgaccggctgccgcttgccggctcgctcgctgccgtaccgaccgtcgagaagcggacgacgcgcgcgtcctcggtcgagccttctgcccccgtcgccgttgcaccgtcgcgacgcaccgagtggccgaccgccagccggctctcatccttctcgcgccgctcggcctcgtcgcgcgagccgacgcccgtcccggcgccgatccgagcaatcgctagcctgcaaactgcagcaggcaaccaggccgacggcgacttcggagacgagtcacttctgatcatcgaacagccctcgctgcttgacgagccgaccgacgacgaaggtgccagcgccgtcgctgccgctgacgactcaaatctcgccagtgcactcgccgccgtcacgctcgagccaagccggcgttccacttcgcccgcagcctccacctcttcggctacagccacggccgctctcatcagccgcgcatcgcgctcaaagcgctcgccggcgtcgagcccgctcgccggcctactcgccgcgtgcgaccaggccgagccgctctcgtttgccgactttctcagctcggccgtgctcctcaacccggcccactcggccagcggcatcccatcctcgacctcggggccggccgtcggtcggtatgtcaaagttggagaggcaacctactccgaagtctttgccgtctaccccgcctcggctccacttcggccgacccggaccggcacccgccggctgacgcccgaccctccgtcgtcgtcgtccacttcctccgacgtcagcgcagagccagctgtcgtcctcaaggtcatcccactcctccagacgctcgacggcacacgctgccaggcggcggcccggccggcggcgaacgagagccagccggaagtgtcgcttgcggacgacgtcgcgcgtgagattggccttgggcgactcgtcggcgggctcgaaggcttcctcgcgctgaacaggtgcatctgggccgagtgacgcgcatttaacgagcttcgaagactgatcctccccctcatccctcactcagcgccgtcgtcgtcaaaggtggctaccccgccccgctcctcgccgaatgggacgcctacaagcacacccacccctccaagtcgcagaatgcccacccagccctctttggccccgagcagctctacgccgtcctcctcctgccttatggcgggaccgacctcgagagcttccgctggagccggacggagggatgggcgcaggctgccggcgtctttttcgccgttgcgggcgcgctggcaagggccgaggccgagctcgaatttgaggtgcgccagtcgctctccctaaaaatggtcggcagtgggatgggacgctgatgaccgccctacccttcacagcaccgcgaccttcacctcggccagatccttgtcaagccttcgtcagcaccgactatcttcccctccattttcagcaccgacgagccgacgccgtcgactggcccgttcgaccgcgggaccggcctcgactgtgccatcatcgacctcggcctctcgcgggtccggcggccgactgacggcgccgtctggtggacggcgttcgaggctgcgcattttgagggcacaggtctgactcgtctttttttttttccgaccttcctgggccgttgctgacgctcggttttgctcctcataggcacgcaggcggacgtctatcgcgagatgcggaacctcctcggggccgacttgacccgctgggacgcctacgcgccgcgctctaacctgctcgttcgtccgcagaagtccgctcgctctcggctctcctcgactctgacgctagcacttgcccctccgtttacatagtggctcgcctacctcgcccggacgctcaagcccaccgcccgcgcgcccgccaagacgcgcccgcgcgagctcgccgcctacagcgcgctccaagcgacgctccgcatgctcgaggccggcgatggcgaggctgccgacttggctggggcgggtgcgctcgttgactgggcccagggcaacggctggtgctcgtgagctagccgccgatgagctttcacctgtcttacactcccccatcttagcctctcctcgtcttgggccacctcgcttcatccccacccttttagtgccactttttcgccctcttcgtcttttcgctctcgctcctccttctcatatcctgtcgcagtcgctcgctgcgctattcgataccccccccatcctacctgcaagggactgcttgcgggcgcaaatcggataggggcttggcccgagggccgtctcgtgtcaccaacaaaacctacaagcatcctagacacgcgagctcggcgtcagacgaggcggccaatgcgctcgccggcgcggacaagctgctcgacgccgtcccgactcgacgacgccaggtcggcgtcccacgcggttgagcccgtcggcgtgacgaggattacggtcgagccgccataagcaaaagccccgcacggctcgccctttgcgagtcgccagccagcggcggcttcgccgtcgtcctcccagaagatcgagccgacaagcatcgcgccgaccgcgacgacaaagctctgacgccctgcggcatagtctgcggcgtctgatggcgggtcgaccgtcagctgccggatctctcgccggttcgcggtaaagacgtcgaggttttcgttgaccgcctgcgggttgaccgtgtagagcgtcgagccggccttgcgagccgggccgaggacgcccggcaggccagcgtggaagcggtgatagtcctgcggtgcgaggcggaagacggcaaccgagggcgagggcccgagcaagcggtctgcttcggctgcaggcaagtcgagcagggctggtatagagaactgctggcccttgatcctgaagatgcaaacaaaggggtgcgctgagggtcaaatggggtccgacgagacaccctgttagaggaggcagaggacttaccagatctgcttggcctcgtcaaccgagtcaaagacggtcagccgacagtcggcgagcgaggcaatgactgtcgggtcctctgggcttgctggcgggcgggcttcgggccggatgcgccgcgaaaagaaggcgttgaacgtctgatgtcacgcgggcagacgacgaagattgatcagctcatcagcgagcgaggtgatttcgaggagcgggagttcatagcgcgccttgtactttgttaagtcaggctcgacgagctcgtcagtcggcagcttgaactgatcgacgaagctttgaatgtgagcgaggacctggtgggaggggcaacacgggcgcatggtgtcagggagaaaagggacatcaagcgagcaagtcccagtgacgcacctcgggaccctcctgatcgtacacgcggccctggcgctcgctctcgcggacgaggagcgcgtcgaccgactcgtgcgcgagcagccggacgccagagacaaagaggaggtgcatgccaatccggacgtagagcggcatttcctcaaagatctgctcgcccgtcgcccggacaatgacgtactggccgagctgctcctggacaaagagctgcgagcgaagcgatcggagaggggtcgtcaggctgcgcgcgggatggcggcgcgcaagacaaggacgagggcgcacgcgatccatcgtctgttcgttgaagaagcgcctgagccaggcgtgcttgcccttcgatggcgccgccgatgtcgcaagcgagtggtacgagtgtgcgtcagcgtaggcaggatctttcgtcgaagggagggagaggcgagggttgcaaggtcagtctcggctcgtcggtcgtcgagcgtcttgcaacccttatgctcgaccaatcagcacagccccgaagaatccactaaagtagactcaccggccgcctttaatccgttggtgtcgacgaccgcctcaagtgccttctgaaggccggccgtgctctgctcgatctcggttgggtcggcctcgctggcgtgagcggtagcggcagtcgccgcgcgcggtcggcttgcctgctggcggactgcctggcctggcgcctgagacgccaagggcgtgtggttgacgggctgctgcttcagcatctcttttcgtgcgatggaggtcggcgtcggcaggcaggaaatagagccggctgcgggagaccgaccagactgacgttcgtcccggcgatggccgggcttgcatctgcaagttaacgggctgcgcttggcgctcgtaataccgcttcaagtgctcggcctgccctccattttcctccgagcaaccgcctaccttcgactagcagcccatacttctcgccctcgtcgtcgtcgacagctcctcacctgcagtgcatccagctttacgcactcctggatccagtgccttcggtcccgcccccggaaggccaccggatggccggccgcttcctcagctcgctcctcccgtccaccttgctcgaccgccggcgtctggccgagggtagccggagcaagctgggatgtgcgagcgaacaaagcgatgcagctagcagcaggtctatcgaggctgccgccgaggtgcgtccttcatcactgcccggacgccgtgccgccggtctgcctgactgaccgagtgccttcctctctgccttcccttcccgccttctagtcggtatgcgccccgtcgacgtctctcgctcaagtgacgacccgtatccgccgagctatctttgacgctccgaacgaggtcgatgtcacgcaccagcctccgctagccaacccgctcgtccgtgcttggcgcgccctcctgctcgcacaggcgctcctggcgagggcaactctagtcgtgccttccatcggccaacagtcgaaagggtcgtcgaccgtcagcgaccgactacctcgcccgccgcctgcggcgatagtgccggctcctcgtcgggcagaggttcaggcccatgcggcgctcgcgctcctcgtcgcccttggcggtctctgcgccgctggcggttccatacgtcggtctgcgctgctcgaggaagctcgaaccggggatgggcatccttttcagtcgattccggccgtcacgtctactgcaaccctcgctgtcccttcatgcgctgacgccaagacactggccgacgccactgacgaccgtcgcacggcatgcatagagcgtttgctcgagctgctcgttggcatcttcgtcgttggcggcatccgaccaccgcctgcgggcctcagtggcccgctgttcgtgccagtcggcctgcttgttgacttgccgccgcttgagagcgcatggaccctatctgtctggcacctagcagagcgtgtggtcgcagagctcgaccgatgcctcccgtcggctgagaccacgccttgctccgacggctcattgccgaccgctgtcactgctgccgaaaaggccgcttacggtcgactcgtccgctcccgcatcagcctggcctacctcgaagccctcttcgcctcggcaccgattcccgccagcagcggtcggacgatgggcagcggccgcggatcaggcctgcccgccgaagctagcaagcgcttcgcagagtgcatccgactcggtagactggtcgctctcgtcggcagcccggccaccctctcgagtccgacggtatcagcgccgctcgtctcagacttgacgccgccgtggtctttgatggcgggcgtcgagttggctcggtcagcccatgccaaccggctcgtatggaaggctcggaagcgtctcgagctcgctgggctgaatgaccgggccgttcagggcctgccggtgacgcctcccgccacggcaccgacgactccaaaggacgaaagcagcctccttgcgccgccgaggcggcttcgcggcaagcgactggcggaacgccgtaaggggacgtatgtcccacccgcatcaccaaaggcctcgccaccgctctcggtcgcctcgctctcgagctcgtcctcgtcgctcgcctcctctgtggcagaatcgcgccgcctggcacgcaggaatcagtcgacgacgtcgctcccctcgctcgagcgtcgacgatcaaccgacctcctgcgggcctcctcgcccgctaagatcggctggcacaaccacgtccctccggccagcgtagcaatcctcgccgccgcatcgcctctcctcaagtcgccgatccctcgaccgctgccgacgttgctcgacccgcaagccatttttgccaacggcggcttggctgcaacggctgtcgctgggggcgccctggttgcctacacaccggtcgaacttgaagcggtccagaaggccaatcagagtccgccgcagctggcattgtcgtcctgggctcggacgatccgccgacaagcatcgtcgacactcaggctcgtctggcagccaataccttcggcctctttgccggccggcgccgctgcttcatcctctgaaaatgacgggcaggcccagtcggccgctgcgccgagcctaccttccctgccggttgactacgaggcttcggtcgcctcgccggcgccttctatctgcccgtcgcttgcttccgactcgaccgccccgaccaccatctccagttcgcccccggccaacggtcacgacgaagccgacgacgtcctgccgggcccgacaccgcaagccatcccttgggcgtctgtcccaccggcaatcggcttcacgccgtcctcgcacgacacgctcggtgcagacgacgacgaggcggacgagaaggcggccactgatggcgctcggtacccgcggatggcgagcggcggcggttggcgcagaggcggcgtcctccggtcattcagtcccgtgccgagtcggctcaagagcgcaatccgggcaacaaggccttgacgacagtcagcagaaccactcgtcgacgccaagcacttttggctcccaatcttcacacggcttctcgcaatctttcacttcacgtccctctccagcatcgacgacgctgctctgccctggagcgtcgttctttactcgcacccatacacgctgccctctcctgtttctgtctctttcgcattgtatcccggactcgcatcggccttgacctccaccccgcacacacacacacgacaagcctgcctctacgccacttgtattccgctcggcctcacatacgagccgctttgatgaccctctgacgacctcgacaacgcggcgcgtgagcggcgtgacagagctgagccgctgggcaagaaggttgatcgggaagtcatggtcgaccgcctctgattgtctacgaagggcggggggggggggggggggaggcgagagaaagaaagcagaggggcgcaaaaggaaggaagccgagatcgcccggcgccctcgcctcctaggctcgacgcgatggggcaaagacaggaagaccgtccgcccgccgatgtgacgtcgtcgcccgatagactcctcgctgtgctcccaccgtccccttccctcagcccctctttctgatgttgatgtcaaagggcggtctactcggccctcgacgacggcccaccggccgactggaagccctcgccgatctgcttggcctcggtgacgaccgactcgacgttggcgaggctggaagcgaagcaggggcagaggatggtcagctctctcgaccattcgtgccgtcctccagctgacgaccgcgtcgacgaaagaagacgctgagcaagacgcacttgtcgtcccaggcggcaagccgggcctggagcgtcgcccactcggccgaaccgaacgaccggatgtaagcccgctgaacgcgcacgctccgcgtcggctgcgacagcttggccgcaatcagcttgagccggatggctgtgatggtgtggatagggttctgtcagctccgcaatatgagagcgcactcggccgcagcaatgtcggcagcatcgtagtgggcagaggccgcaccgtcaatgacccagacctcgacctcggactcgtcgacctcgagcgccttggcaatctcggcgtacgggacggccgactgctccatgctcgcgcagaggccgacgagcgtcaagagccggaccttcttctcgagcgcggtcccgtcgagctcagcgagcgtgctgccattcgcggccgaccactgacggtagtcggcgagtgagccggtttgcaggatgcggacgagcgcgagcagcggctcgggtgccgacgaaagcgcgggtgaggcgagcaggctgtcgaacgagaggactgagggaaggcggagggcgagcttaatcgtcgccgttgaggccgatgccgagttggccgcagacgggagggagaggtgcagcagccggtaggggtacgaggcctccctgacagtcgcacagaagccacagccggccggtcagcctccagcatcgctcgcaggcgtagcccatgaccagacgcactcgttcttcttggccaccgcctcggccaccttctcgacaaaggctgccttgtcggcctcgccaacgtcggcccactcgccgatccacgtcttgacgaggctcggcgaaataccgacggcgctgagctcgccgtgcgacgaggcgacgtcgatcagggccgagattgtcggccggcggagagccgacgaagcaggaaggaggttgtgcaggttcgacagactgcaggcgaaggaggcggcggtcgtcatcgtcagcgtcaaatggccggccatacgaccgacgccgagtcgctggctgttccgccaagccggtcgacgtgtgcagaccatacgcacacctggtactgagcccgccgacggtccgacgacgacgctgcggtcgcagcgagcagcagctgagggtaaagggcagtgaactcgtccgagccgagcgcatgcgtcgagaggacgacggcaagaagcaggttgaagaagccctcggtctctgcaggacagccgcacgtcgaggcgcagcgcaagagggagtcggtcgaggacggaagggtgtagagacgtagccggtcagcatgcctgccagtgagcctcacccgagagccagcacaagccagaggacggacccttgtcggtaccgttgccgaggtcctggacctcgccgacgagccgctggacgatggacggccggtcgccctcgagcgagaactcgctcacgtaggcctcacgctcagcctcggcctttgagcgcgagaggtagcgcagaagctcgtcggcctgagaggcggagcgtaaggcgtagcaggcagaaacgaacgacgagtgtcaggaagctctgttccgcctgattgaaggacgacatgtgcggacggacctgctccttgaagtctccgtcggcacagatcgtgacgctcatatctagaaaggaaaggagggaagaaggagagggggaggctggagggtcgaggtcgagtcttgtgctggctggccgggctgtcgcagctctcgcctcgccctcgctccccgttgcgccgcggggcttgtttcgcgactttcgcgcgggcggcgaccgattgatgaatcgattgatgaattcgactcgagcgcggcgcgtcgacgtcgacgacgacaccctctctcgctcctgacaccctccctcgctcttctccatcagtcatgtcttccacagcgacgcagacggccaaggcgcaggcacccaagcagctctcgtccgtccagttcctgctgtgagctgcggcgagctaccgggcgccgcgcgctgacattctccggatttcccccttgatctccgccgtccgactcggccgggcctccagcgaccaggagatcaacgtcacttaccagcgcatgaaggttagtcgtcttgcgcgaaagtgtgacttgctgctggagaggctgactgagcctgcgctcgcctccagaacgagctccaagggatcgcaaccaagatcggcgagctcgagtccgagtcggacgagcacgcgtcagtttcgacctcgaggcctgccccttgtagctcgaccgacgctgacgctcactcggctatcacacctcctacgtctcatccagcctcgttctctcgactctgctagagacgctcgagaccgcgccggaccgcaagtgcttccggctcgttggcggcgtgctcgtcgagcgcaccgtcaaggacgtcgttccggccctccagaccaacaacgacggcgtgcgttccagtcctcggactctctctatctccctcccgtgcttgcgccttggatggtgtcggctttcgagtgcccgacctgtcgggcaccatccctttccgctctcacgtgccctcgactcctgctgcgccgtcgctcacccttctctcgctcaaacgtcgcgacaaaagatcaagcaggtcctccagacgctcatcagccagtaccagtcgcgcgaagccgagtttgaccgttttggccgcgagcacggcatctcgacctcgcgcgtccagcgctcgtagagaagccgcctcacgtcgggagctgcctctgcgagcgccgcgcgacagtcgctccacgtcctgggtcgctctgtaggtcgaccgatactttgcgggacggcccgctgaggccagtcaccgctgcgcctgtcggccgaaagtccagggcatctttgcgcctttttggcgctcccatcccgatcgtcgtacggccggtccagcgggcatgtgacggagggaagctgcttggcttgcgccacgtgttgggcaagccgaccctccgtccattgagcgcatcactttcgtcggtgaatgtatgacgacctgcctttcgatttgcgccttgtctcgaaggcaaacgctttgctccgctgagaagcagcagcgacctgtgtcagtcaagaggggccgttatgcgctcattccaaaacaaaagagctaataatcggcagcagacgtagtctcacccagagtcgaactggggtcgtaagtgagccaacaagttgttagacttaagtgataaccgttacaccatgagactttaatgaaagcagcttcatacatttacaatataaacagccaactgtgccttgcagcaaaacagagcttgcctttcggccgcaagcccgtcgacccctttttaactgttgactaccatcccttcctatcccgctcgagctaaatctcgactgcctgcgactgacattcgcagcccctgatctggcgaatacaataagtcatcgatggccatcaccagtcggctttgaccctctccctcttgaacccctttgctacagattagcggcgacgtcgtcttcggcaagaacgttaccctccgcaggacctacattattgtcgccaatgagggcaaccggatccagattcccgacggctcgatcctcgagaacagtgcgtgctgcgtgcgacttggaagagaatccccactgacgctcctccttcctgcgccttccattctccgctctccttcgcccttctcctcctcctcctttcctctcagagctcgtctcgggcaatttggcaatcatcgaccactagcatcgcgcctcctttttcccttgctctcgatcccatcgttcttatttttttcaacactaaggaaaggctctgaatcatccaggcgctggatctcaaagtgccagagttgaaattttgtttgcaaatcgcttctacgagtacgagggacgcttataagaggtcgttcagcgaacggcacaggacaggtcccagagtccgccccttgcttcccagccggtcaggcgacgcttagagccgaatggccgcctgctggctggccatcgtcgacgagggtcgctgagcgctgcgccgggcctggccctgagtggcctgcacacttagacctgcccgtcaactccctccgctgttgaccactaagcgcgcgctctttgccgtcttcgtggctgtgctgttagccgcttttgttggctcgcacttcgttcgcacgacccactctccctctccccttcctgctcctcctccttcttacgcattgcacactctctctatggccatccatcccttgctactctctcatcctctggctggctgccgatagaagcgcaaataggcggatggtgaggctcagcgggagcgatacaacaagtcatcaacgtcaatcaccagtcgtcctcgccctcgacgccgcggacaaagtcgccgacgaccgtcgcgagctcgtcgacgagcgccgtccggttccaatctgcccgccggcgccagatggtgtccgagaggagcgcacgcaactgttcaagctgctcaatattgaacgccgccgtccggtccgagatggtgcgctcgagggcggcgagggccgagagcggcagcacgaagggcggagggggctcgggtacgagcggcgtcacagctggctcggctgtcgccggctcggtttcgtctgatgatgctggaggccggctgatggcgaagggtccgtgcacactcgcgtcggtcgccttgacgggcgagccctggtcagagacggttcgtacgagagcgccgttcggccgaggggtggcgagctcgtcgagcgagagcaggccgtttgaaccgccgccgccggctccgttcgcctcgctcaacgagcacaggtccatgattgaaacggaccggtgcgtcatctgctggcgcggcgtcatctgcagcgcgagcgaagccgacgtcgaccctgtcgggtcgctgtccatcgtcgtgttcttcgaggccgtcggcctcacaggcgagtcgaggacgataatcgtcgaggtgtttgagtcgagactcgtcgacgaatgcaggccgttgacggcggtgctgccgtcggtggcgtcactgcgtggcttcttcgtcggcggaagctcgccgtcgacctccatgccgtcatcgacgtcgatccggatggggccggccgagccagccgcgtcgagcgagacgccgcgcgagcgcttcagtgacgcctcggggttgtccattggcggcacgagaccgtcggccggtacgcccctgacgcgatggctgtaccggctggccctcgggtcgggctggccgtcggccgtctcgcggcttttgcccttcctgtcggcgcgcgaagcctcctcggcctgctccttggccgcctcggccttgaccttgcgccggtccatctcgcgctcggccatccgccggcactcgtgccggaattgggcttcgcacgactggtcgacgagcagctgcgcgtggttgaggagctgctgcgagcggagcacccggtcggtgtggcccttgtcgaggtgggcattctcgacaaagacgtgcatgtcggcgaggaaagcctcgaccgtcaggtagcggtcatagtagagcttcgagtgtatctgctcgaggttgatgtcgaccggcatgggcggaatgtcgcggagcggctccttgtccggggcataggtcgaatggccgtcatcgtccgagatggcaatcgggtcgtgtgagttggccgcaatctcatggtcctcgatgacctccttgcggtactcaaggtagagctcaaactcctcctgcgaaccccgcgagcgacaacgatcgaggtcaggagagcatgtaggtcaaccgacgaccaatctcggagacgcacctcgatcggcttggtgaagcgcttgtgcttccgcttgagctcgttcaggacggggccgagacgccacttgagatgctcgcgcaggcggccgtcgttttcctcctgcagggcgagctctgctgggctcggcttgcgcggcggtggcggcggggcgagtggcagcacctcgaggacgcgccggcgcttcggggccgcgtccggtagctcactcggtgttatgcgcgcgagctcgaggatgccgttgaaaaactcggcgcgctggtcctgcatgcgcgcaagcagcgtagaaaggctgggtcagttgcgggtttgctttttcgcccacccggatgaacgcacatgactggggcaagtgagggcgacacggttctccttcgcatggccgaaccaggccttgacgtcgcgcggaatgtcggccaccaggccgtcgacgacagcgagcagcaggaccggatctgacggcgcgaggctgtcgagcagcgacttgaatgtcgcccgggccgtctcagtcaccgtgttgacccactgcgtgagcgaggggataaacaggacggccggcttgtgccgcttggcctcgatgaaaagctgaacgatggcggcctccagcgtgcgggttgagtcgccgagcagggtcgcgaggtccatgctctggacgtggaagccctcgaggtggtgcaggacggctgaggcgaggtagctctggccgaggccctcctcgccgtggaggatgaggcgcggacggtaaacgcgcgaggcctcaaactcttgaagccggagctccttctcgtacgagccctcagccgggtcgtccgtctcccactcggcgtcctccaagacactccgcttcttggccggaggcagcgcgcgatcgatcgccgccgtcgtctgctcgagcgcgtcggccagaagcggaacgaggtgtgccggcaagggcgcagcagccgaggccgtcgaccgtgccgatgacgggatgaggttcttgaccgagaccataaagtctttggcctggacgtgaatcgagtctggctggagcagcaggcgttcgttcgtcttatagatctggggataccggcgctggatggcgttgagcgatgcctcggtgcacagtgcctgcgaggtagtggggcgagcgtcagtgcactgatcggcagggaggcccggactaaggacgaacccgcaggtcggcacctccgtaacctttcgtgacgtcggcgaggttgtcgagcagcgggccagcgagcgccggctcccacgtcttggtgttgatctcgagaatcttgcgccgggcgaccttgttcggcagcgggaaaaagaactcgcggtcaaaacggcccggtcggcggagggccgggtcgaccgcgtcgggcctgttggtcgcgccaatgatgatgacctgaccgcggccgtccataccgtccatgagcgcgagcagggtcgagacgatgctcgcgtggatctggtcctgcttgctgctgcgaaccggtgcgaggcctacaaggagtgaggcgacaaaggtccgtcagccgggtcgccagatcgcacctacgagcgaaggggacgcaccgtcaatctcgtcgaagaagatgatgctcggttggcacgccttggcttcctcgaaaagcagccgcagctggcgctcagcctcgccgacccacttgctcaggcagtcggcgcccttgcgcatgaagaaggagatcttcgtccctgtcgaggagcacgaggcggcgagcgcacgggcgacgagcgtctttcccgtgccgggcgggccgtggaagagaacgccgcgtggcggggtcacgttaaactgctggaagacctcggggtagagcagcgggagcgagaccatctccttgagctgttggatgtctgcgagtgagcagcgcaaggcgactaatattaactggcgggagccttcagaagggctagtttaaagacgaacgctgatccaagccaccgacatcctcaaacgtgattttggcgttgacgccgagcgggtccgcatcggacaaggctaaggatgggtgcaaaaggtcagccagcaggtactgggtgcaagacagactcgccgactcgactcactggcatcgccgaccttgcccatattgctaggcccgccgaccatgtccatcggcatggcaggattgaagagccctccaccggcaccggcgccgaacatgccgccgctgccacccgctgcggcagccttgctggcggcgcccttggcaaagtcgtcgtccgagtcgtcaccctcctcctggaggcccatgtacttcccgagctccttgccagtcgagccccagggtatccgattgtagcccgagccgctcttgcgaccgccgccgacgaccgtgccgtacgcgttgctgcccgacttctttttgcgcggcgaggccctcgaggccgactgctggtccgccggcgggatgagctggtagtttggccggttcttgcgctcgcgcagcgaccgctggacctgctgcgacgacgactctccctcggaggcggaggcgatccgccgcgaagtgcgcgtcgcacggccggccgacttctggttcgagccccgcgtcacgcgccggccgagagtgcggaccgggtggtcgtctgcgcggaagatgcacggttgcgtcagcgacgacggccagaaggaactcacgcacgacgattggaccgaccatcgtcctcatcgtcctggtcatcgtcctcggtgtcgtcggggatctcctcaacgcgaaactcctcgtcggccgactcgtcaaagtcgccctgcgctgctccgttgacctccccgccggccgcacccgaccctccagccgatcccgctccaccaccgaggacgccgtccgagccgtcgaagccggcaggcagctggtcggccagacggaggatgtcagggtcaacggccgggccggtcgagcgcaggccacgccggttcgaggtgatgatgctcttcgggaccggctgctgcttgatggccgtccgtgtcggcgcctgagctcggagctgagatgccgactgctgcgaggctgcgcgcgtgctccggacgggccggtgcgacgacggctgaaagccgcccgatttggaagaggaccggcgcgatcgagaggaggctccgaggcctccttgctcgtcgtggctgtttgactcccactcaggctggtcctcgtttttcgaaatgaagtcgaacgaagccctgaacggcgaagtgtcgttcgcaagaggcgacaaaagaccgtcgagcaaacaaattagggcgacgaggctggtcagcacgacgcgtcctcggtcaagagcgcgcggcgccatacggaccgcttgcccttgcgattgcgcttcggctgagagtcctcgtcctcgtccatctcgtcgtcggtgaagttcatctcggtgacctgcttgagcaggtgagcaggcggcttgctcacccggcccgagcgcgagacacggggagaggccgatctgaggaaggcgagcgatgtgtcgccctcgccatccttgtcgtcggcgtcgtcgtcgtcgtcgtcgttctcggcgtagctcgtccctgagcggcgacccgagcgccgaccgttggcagctggcggggctggccggttctggacctcgatctcggactcgcccgagtcttcttcgccattgtcgccgtcggtcgtgccattgccgtcggcatggtcgagcccacggccaagctcaatgtcgggcgcgtcgtcctcgccgtcgatggcggtggcgtcgtcgtccgtttcgccctgagcgtcctttgcgccagcctggtcatcagcgtcctcagagggcgcagagagggtgctcgtcgccgtcgcagaggcggccgaccgcttgaggatgatccgccgtgggccgagagccggtggcagctgctcgccgccgccgtcggagggccgggcctggaaggctgagtctggcacctcgccatcgacggccatgccgctgcccggaaggtcgtgcgcgaccatgtctgcttgatcgagcgacgtcttctgctgaaagagcggcggcagctgctggtgctggccaaagaggagcgcggcgcggtccggcgcgtgcgtcgacgggcgcggcggaggagcgggcgagctgaagaagttaagggcgtcggaggatggggcgccgggcgagctgatcgtgcgggccatccagcgcgcgacggaagactggaataaggcgcttaggcggcgtgggcttgctaaaaaggaagagggaaggacgaaagtatgtaagggctcgaccggctgccgaaggcgagtgggaggcgaagcggccagcagagacgcgacgggaaatgagagttacggctgaccttacgcgcttcgagtcagccgagtgtaaatcagttactggtcgaccagctcctgtctcttctctcaggaccagtacgctgcctgcaggccatgctgtgcgacggcgacgagctttgcaagtcgacggtccacgggctgtcacctctttctttcttgcgggacatgccggccgtccctcggcatcgtccctcggtgggccgctcggaagcatgacgagtcgcgagctcgctgcggggcgaaacacagcccggccgggccgcttcaagaaggcctgccggtgcagctctctcgactctccgacaaccaccttgccttcatctgcgtgctacctcttctcccgctatgtcctactaccacgacccaaaccagcagcagcagcagcagcagcagcagttcacgccctaccagtcgggcggcccgcctcctcaggtccgtctctctgcccttcccttcgctcagccggatccgagactcgctcgccacctgctccctcccgctaccctagctgatattcttgcatcccgctcgcccagccgtaccagcagcagccttacggtcaacagcagccctacggccagccttcgtacggccagccggcctaccctccgccccagcagcagcaggcgtacaacgcaccccctcagcagcccttcggggcccctccgccgcaacagtcgtacggcgctcctcctcctccccagcagtcttatggcgcacctcagcagtcgtacggcaacaccggcgggtacagcgctcctcctccgccggcgcacaacacgtatgcgccgcctccggccccttacgcccagcaaggcatggcgacccagggtgcgcccctgttctacctcggctcggtcgtttccccgctggagggcatgaacatgggccagccgctgccgccgccaccgacgtacaacgcctcgttcgacgctgaccggctgcgcaaggcgaccaaggtgcgtccgttccgaccgctgccgatagtcagttgaggtctgaccagctccctcttcccccttcgcagggcttcggcacagacgagcgcaccatcatcgacacgctctcgcccctcggtgccgtcgagatgacggccgtcgcccggacgtttgaagcccaggtcggcaagtcgctcgtcaaggtgctcgagaaggagaccaagggcaactttgagtacgccctgcgaggccttgcgatgggcccactcgagtgggacgcctggcttatcaaccgagcctgtgccggcgtcggtacgcatgaggagtgcgtcgctttctttgcagccgactcgcgattcctgccgagctgccctccgtgctgacgctcccgacgtgatctcctagccttctcaacgagatcgtcctcggccggaccaacaacgagatctacctcctcaagagcgcttaccaggccatctacaagaaggacctgacgcaggtcatcaagggcgagctgtcgatgaagacggagcgcatggtacgtctctcctgcacaaggccgatccagcgttcctggacgctgactccttgacgcacgcctcgcagttcatcatggctctcatgggcaaccgggacgagtcgttccaggtcaaccaccaggctgtcttgcacgacgtccagtcgctccactcggccgcctcgggcatgggcaccgacgagattgcgatcacgagcgtccttgtcacccgctcgccggcccatctcgccgccgtcaaccaggcctatgtctctcagtaccgccggccgctgtcgcaaatgatcaagagcgagttcagcggccacatgaagggtccgtccgtcgtccgagctgcgagcgctttcgctgatcgccgcgagcgaagctgaccctggcctctgtccgctgttccagacgccttgctctatatcgcggaggccgccgaaaacgacggccagggtgtcgaccgggacgccgagatgctcgaggccgccatgtcaggcatgggcaccttggacgagcgtctgacgtggcgcatcatccgtggccactgggagcgcaaccggtgggaggccgtcaaggcgtcgtatcagcgcaagtacggccggtcgctcaagagccgcgtcaagggcgagacgtcgggcgactttgagcgggtcctctgcgccgtcatcggcaactgaggtagcatatgcaggggtgcttctggcgtctcgtcatctcggcctcgagctctgccacttcctccgcgccttttttacattaccttgtctcctggtttcgctcggaatttagtcatcaccgccgtcctctgtatcatgtcgtctgccaggaaacgtgactgagcattcaggactcgccaggccggcttcgctggctgagaagaagtgctgcgcgcgctcgccggcttgctcctgtcgctcgctcccgtgcctaccttgaccttgacctcaacctccatgacccgcgccgactgagaacgctgcctcagagccgcagaccagagcacggtgactgatcggagcaactgatgcccaggaccggctaccaagtctcgacaagcgggagaccggaagccagcccaggtcgtccctcgagcgtgcctgccggtccccctccgccaaaggacgcgaccttgggtgtgcctggcccgcctcctttgcccccttcgaacgcgaagcggcccagcgcctcctgagatgcggagagccggtcgctcccatcccgctgacgaccagcagctcagccttccttccttttgacaccgccagcagcagagctcagccgctcagacaccgccttcctctgcccatgtcgctcaaggtcggtcgctcgccgtcggcctgggtgcccgctgtcagctccttccctcgcacctggatatacgctgacacacaccgatgccgaacgggttgaacaggccgagctcgagcaatgggtcgacgccctcgcagcgttcgactcgggcgactacctcgccgcgctcgacgtcttctccagcatcgccggttcgtccaaggtgcgccccctcgtcggcgccctcctgctgcatctatctgcccgagccgaccctcagcctccagatcctctttaacatggccgtcatcaacgcgaccgtcggcgagcacgcggctgccgtcaacctcttccgagcagcgaccgagcgggaccgctacctcgcgattgcctacgtgcgttcaattctcggccacgccgctcgttcgctcatcggctgcactgacgacctcaaatctttttccctgcagttccaggccggcgtcagccactttcatctcgcacgctttgacctcgccctgcgcgactttgaggaggctctgatttacctccgctcaaacctgaacgtgtgcgaccaggccggacacctcctctttccagtccgtccggaccctgctgacgccacgacgcgcttaacgcgacagaaactacgagcagatcggcctcgccttccggctgcatgcggccgaggtcaagcacaacatcggcctcagcctcctggcgatgggcaaccgagtgcgtcgagagggagactcacaggcctgtgcagcgctcgagctaacgcttcctcttgacaaatttgcagagagacggtctcgcggcgcttgccgacgccacccgggccaaggccgtcaaagagcatgagttgatcgacgcctgcctgcgcgacgagggccgcggctacaccatctttgccgtcgtgcgtccatgagtgaccgccggccaggcctacttccgtgagcgtcttagctgaccaggccttgacgacaacagccggttggtgtcatcttccgcccgcctgcggcgaagctcaagaacatccaagccaaggactacctcggcaaggctgtacgttggtcctgacaccgattgtgcaacttcttgagctaactgcgcaatcctgcgcctgctctatcagcgactcgtcgcagcgtctgacgagcgcgacgcctttaccgccttcactggcgtcatgcggctaaagctggggctgagcccgactggctctcctctcgaggacgaccgggtggccgccatgcgcagcgacagtcttatggtccgctcgacgtccgaccccggtctacgtgcgcactctctcttcttctatcggaatctcgccctttccatctgacaaagaacctcctcgttatattgagcagcgcccaggtcgccgatccggcaggcgatgcgcgaggaggccaggcgcggcatcgacgctggcgagggcaccggagcgctggccgcttccgccatgaaccgcagcaagtcgtcgacagccggtgtcttccatgcaaccgacaaggctgaccagggcatgcgcaaacgagacggggaccgggggaccgacctctgtgcgtctcgcgtcgctgctggcaagaccgacgactgatcgacgacccttctgctggttctcagatgacgactactaccgtttcgctcccgacctgccgccgacgcctcctcctgtccagtccgtccaggcctgggctgtcgatgcttgtgatgctccacctccacctgagacgagcatctctcggtcgacgtcaggctcaaccttgccgcaagtcgcgacgccaggcagaatttcacctgtcagctcagccaccagcccgccctcgtctttccgaggccaggcgcccatccgccgcaccccgagcgggtcaggttcctggctgcctggcctgactgccctcaagagtcaccaccggagcggcagccgagcgtccgagcggaaccggtccattacgtttggctcgccgatcgagcacggcgacactgtcgacgacgacgacgcctacagtgttattgacgacggcgtcgcattcgagatgaccaagattcgactcaaggtggagattttcttccgagcgaacttgccctgaaccctgacgtcaaagactgacctctgctcgacccccgtttcctcgcagatccatcacctcaacgagatccgcggcctcggcctgacgcctgacatgtcgcatggcaactttgtcggccggatcgtcaccaagtttggcctgcgcggcgctgcagcgaacaagcttcgcatctgcttccaggacgaagacgggagcctcgtttcgctggtcgacgaggtgcgtcgcttattctgagaccatcccgtcgtgtcgctgacagcgcagaccgcactctaggacgactttgaggcggccatcgacgtcgcacgagcccaggcaaagggccggccggagggaaagctcgaggtctggcttagcacaacagactgaccagctcagtccaatgctatgctgctctcgcttcaccatacatgcgtcttttgctcgcatagatattggcgaccggagcacagaggacgggggacgactcgagcacagaggaaggtcgtaggtcagcccctttcttcgccgcctgtcgaaagcataaagccggccgcgccgctgaacgcgtcaagctccgaccgagtccatgccggtcaaaggcagctcgttagctaccgacgcccatgccttcatctcgcgtcgctgactattcgctgtccgccctcgatgggcctcttctcgcgcaacaagacggtcgctcctcgtgccggccctcgagcagcggcaggtaagaacgcgaccagcaactcggcctgctggttgccgggattcctctgagcgtcgacgaccgagctaaatctccatccttctgcctgcttgaacttgcagacggcagtcacgacaaagcctacctgtatcgagatccgtactcactcttgttccgacctgagcccgtgacgtttgagccgcaggcggtcgcctcgctgccgcccaggccgtactactatgcgcctctcagtggtgggcctcccaacaccttcctgggtcatccgacgccggtcccgacgacttcgatgggcgtgacggagcttgccactgcaccggctgcaaaggtcgccgacccagccagccagccgaaggtcccggattcgctcggcccgccgcctggatggtggactcggccgtttgcgccgggccctcagaagcaaaatctgcctccatcctggctgccggcgccgatttcccctgccctgtggccccaacctcttacgacggcaaccgcctggccgccgacggtcgccttcgacgtccctgccggcgccgacaaccagtgggcgagcgtcgactacctcctgccgcgtgagacccgggaaggactcggcggggagcatcgcttcgctgggcagcgcaagttcagcagcacacttcggtgggtcgatccaagagctgtctcgaggccgccgagcgacgcatgctgactgccggggcgacgatcggtcgactctgcacgccaggcatgccctctttgacgcgtgagggaggctgcgcggccgacgaccggctccgacggcgctttggtcgctctcgaacctcggtcgccttcaacgaacgtcgtatcagaagcccttcttggagagcgacagcgttccggaagagcatgccaggtcaacgcgaccgatcagcctgcgagagacgaaaccaggcaggcgggcacgcgtggcgctttggtcggccgcgctcgtccgaggcgttgcctgccggagccaccggccgtcgccggctcgcagcttgctgggctgaagatagacaggcagcttccctccgatccatcatctcgctcgacctcgcttctcgattttcgactaaattgcgacattccgcaactcctttctcttcacttggtcgctccaggcctctcggacgctgtcgaacaagatggcgccgtccttccaggcgatccttcacgcgccgctcacgctcttcctgccgtcccttctgctccttgtcttcccgccggccgtctcgtacggctatgccttgcttcctgcggtcggcaagagctcgcttgccgcgccgttcgcgtacctcgcccccttctgctcgatcgacgagatctacccgagccgctcgggcgagcgcgcgcgggttgccggctggaaggtgctcgtcctcgtcctctgcgcggctgcgatggccatccgctggttcgcctctgccggctgggacctgctccagcggcaggaaacgacctggatctgggacggcctgatgggcttgctctgggtaagcgtctgtccgctcgatccgaggtcgacgagagagctgacctttgtcgctgtctcccgcgtttcgccttccgcccctggcccgacctcgcgcttaggtcgctgccgctctgtcgcccggcttctccatcatggagacggccagcgcgtctctgacgctactctatctcgtccaggcgacctactcgtacgttgcgagcgcagctcatctcctggcttagccgtcgcggctgacgtggtctcccccccgcttcaccgtccgcagcacgctcgtcctcctatcggccctgtaccagtggtcgctcctaccgcccatcccacacagaccggtcatctcgctcggcgctgttctcgttgagctctactcgatcgtcctcccagctgttctgatcggaacgagcctgagcatgcccgtctcacgcgtgcccgagccctacctcgccgacaacaaggctgagatcgatgccggcacgatgggtgccagccctgaggaccggtcgtcggtctacggatggctcacctttcgctgggtctacccgctgatcaagtccgtgaatagtggctcctctcgtcctcctcccgaccacaagctgaccgacttgcgctcgggtccctctgcaggcttggctcgtccggctaccttcaagactcggacgtctacacactcagcccaacccagcggagtaagccgctctacgcggccttccagcggattgccgcgacgaacctgctgcggaagatgctcaagacgaacggcctcgacctcttcctggacgcagcactgacggccgtctcggtcgtgctcaactactcgtcgccctacttcatcaagaagatcatcgaagctctgacgacgccgacgcccgagtcgatggccaaagcctacacgtacgcgctgctggcgttcctcgcaacgctcgccaaagcgcagtgcgacctcaaccacctctggttttcgcgccgagcggcggtccgcgttaagagcaccctcacgagcgccatctacgaaaaggcgctactccgggtcgacaagtctggcgtgggcgagtccaagggaacggccggcgtgggcaaagtcgtcaacctgatggccggcgacacgaaccgcatctcgaaccaggtctcgtcgctgtacatgctgtacgcgtcaccctttgagctgctcgtctgctgcaccttcctctattcggtgagctctctttcgctacatcttctcttgccagtaagttggctgaccgtccttgtcgcctcgcactctgcagcttctcggttggtctgcctttgccggtctggccgtcgtcgttgcctcgatgccgatcaacaagggcatctcaacgcgctcggttgtcatccagaaggatcttctggccgcccgcgacacgcgcatgaacattatggtgagtcatttcgccagtcgcgttccgccccgtcccgccccgcctgaaccagcatgcgaccgtccactcgcagaacgaactcatcggcgccatcaaatacatcaaagcctttgcctgggagcgccagtggtcgaagcgcgtcattgacgcgcgcaaggtcgagctcaaggtcgtcattcgcgaccgcatcaacaacgtgagagacagcctgctctggagctcagccttcatcttctgacccgcggccggcgcttcccgcgactgcaggtctttttcacgctcctctggacggtcacgccgatgcttgtcactctcgtcagcttcttcttcttcttgaaggtccagaagggcgagttgacggccgccgtcgccttcactgcgctctcgctcttcagcatggtgcgttttttttctccccgttgctctgcgcatgcgtccttttggctgacagcgcatccgctatacacctcgccaggtccgcatgcctctcaccgtcctgcccatgttcctcgtcggcctgcttcagaccaaggtggccatccagcgcatcgaagactttcttggcgaggaagaggtcccgacctacgtgtcgtcgctcaagctcgcagccgaactggcgacggcccccggtgccggtggggacgagaagattggcttttccggtaacgcaagcttccgctggaactcaggcaaggacagcgacgctgccggttcgcctgctaagaaagccaccgacgactccgtcccgaagccggccgcagacgacgcggccgaagcggcgctagaagacgtccgcttcgagctccatggcctcgactttctcttcccgatgggcctgacgatcatcagcggtccgaccggcagcggtaagactgccctcctctacgcgctccttggagagatggagaccgtccaaggcaaggtccatcttccaaagcgggctggccgcttcgacgccaacggcctgtcggactcggtcgcctactccggccaaaccgcctggctgcagaacatgagcatccgcgacaacatcctctttggcacgcccttcgaccagtctcgctacgacgacgtcatcaaggcctgctgcctcacgcccgatctcaagatgctcgaggacggtgacagtcagtcctgcctcgaatttcccttccagtctctgccgcgcaagttctgacagcagagctctcctgcaggcaccgagattggcgccaagggcgtctccctgagtggtgggcagaaggctcgtgtcgccctcgcacgcgccgtctacagctttgcgaaaaacgtgctcctcgacgacccgctcagcgccgtcgacgcccagtgagtctttcggccgctaaatctgccgctcttgtcattgacaatgtgcgtcatgactgcagtaccgccgcctcgctcgtcaacgactgcctgtcgggcccgctcctggacaaccgccgcgtcatcatcgtctctcaccacgtcgagctgctcatcccgatcgcgcactccctgctccgcgtcgtcgacggtcgagttgagacgcagggctcaatcaatgagctacgggcccgaggcgacctctcgtccatcgtcgccactgagcagacggccgtcccggacgaggtggctgtcgttcctgaagcatcgaccgaggcagacaccgtggagatagtcgcgcaggcatcggagccgaagaaggaggcccgcaagctcgtaaaggacgaagagcgcgaagtcggcaacgtctcgtggaagacctactcggttcgtctccccgttcgagcgaaaagtcgcggccggcggtgctgacatctgcttgcttgttgctcgctttgcgacagctctacttccgctcgagcggctacggcgtctgggccgtctctctcgtcctcatgttcatcgccaacaatgcctcgatcttcgagcgtgcctggatccggacctggaccggcgcttacccgaacgcgcagcacccgcccaaggagcaatttacgacctcatctttcacgcaccaccatcacgccgccacattcgtcgcctacggccacgttgcgccgcagacggcgtttacgaccggcttctctgcagcgaatgagacgacgatcggcatcgctgcctatccacgggccgacactcacccgttctactacctcttgatctggaccggtgcgtcttccgaaccgacttgtgcgtcgagcttcgcaacggctgacgtcaatctcttgttgtcccagccattctcgctggcactgcggtcgtcacactgatccaagccatcgtcggctactatggtgcctaccgagcctcggtccggatccacgacgacatgctcgagacggtcattcggtcgacatcgcgctgggtcagtccgcacgatgcgcaagccctgaccgctgccaaaactgacgagtttccttctgtccagtttgacacgacgccctccggtcggatcgtcaaccggttctcgcgcgacatcgagacggttgattcgtcgctctcgcagtcgctccgagtcgtcgtcgcctactttttcgccctcgtcggcgcgttcatcgtcgtcaccgccatcacgccggcgttcttcctccctgcctttttcctcgcagcggcctattacttcctgagcttgcagtatctccgtgagttcactctgtcgactgttctgccctcgcactacgacggctgacaccgctcaccttcaggctgcggccgagacctgcgccgcatggaatcgaccgcccgcagcccgatcttctcgggcttcaccgagacgctcgagggtgtcgtcacgatccgtgcctttgcaaaggagacgacgtttatcgacaacctgcagaaccaggtcgacaagtcgcatgcctgctggtacgtgccttcttctccacttgcagcggctttcgacacaaattgatctcggcgaccctcgatcaggtacttcacttggatgctcaaccgctggctgttgctgcgctttgactgcctcggcgctctcgccgtcttcatcacgagcgtcctttcgctggcaagcggcatcgacggtggcctcgccggtatagccattctcagctcgcagacttacgtcagctccatttactggctctgccggtgcgtcgttctcctactggatgtctactcggacaaagcgcgtcgctgatacacgagtccccctcacctcgctctcagctactggtcccagctcgagatggacctgaactcggtcgagcgtgtcgaggagtacctgcacatccctcaggagccgcctgcgatcgtcgagtcgaaccggccgccggcgtactggccgacgatgtcgtccgacaccctgatccacgtcaaggacctcgtcatcaaatacagccccgagctgccagccgtcatccacggcatctcttttgttgttcggccgcgcgagaagatcggtacgtctttcaaccttatctgtctctctagctcgacaattgaccctcgtttgctcctctcgctgcctgctccgctatgatcaggactggtgcgcccctctcgacctgctttgggtgtcactcgcgctcggcggctgactcttgctcgcttggcctcctagattggtcgcacgggctctggaaagagcacgctcggcatgagcttcctccggtttgccgagcccgcagggtacgctcgaactcttgcagcgactcgcggaccgttcaggctgacttccttttctgttcggtctctcttcagcggcaagattgtcatcgacggcattgacatttcgacgatcgggctcgaagaccttcgaagccggattacgatgattccgcaggaggcagtcctcttttcgggcacctgccgcgacaacctggaccctttcaacgttgggccctctttgcgtggtcgctctcctctgcgccctcagcgggctgacctctcctgtcccgttcaggagcataccgacgaggaggttcttgacgcgctgcatcgagtccagctcggcacgggctcgacagcgacgacggccgctccgagccggtcggcgtcgtcgaccgccctctctgcgctcggcaacggcggcgaggcctcgtcctcgacggctgtcagcgtgactccaacggcgacgggaaagaaggcagcgatccggctcgacacccaggtctcgtccggcggggccaacttctcgtcgggccagcgccagttgctcgcgatggcgcggtcgctcctgcgcaattctgcgatcatcgtaatggacgaggcaacggcgtcggtcgactttgagaccgacacggccatccagcaaacgatccgccaggagtttgacaactcgtgtctgattacaattggtgcgcatctctcctctttctcgccagcccaaccggaaggcggtgctgacgtctcatgactcttctcgcagcccatcgcctctcgtcgatcatcgattacgaccgcctgctcgtcctcgaccacggtcacctggtcgagtttgacactccttacgcgctcatgaccaaggacggcggcgaggacacagccatcttcaagggcatgtgcgccaagagcggcaagtgggaggagctgctgcggagcgcagaggccaagcacctggcgtcggtcgctggccagggcgagacgtcggcggcttgaagcgaggaggtcgggatgggcgagaggagacggctatcgatgtggccaccgagccatgagtcctggtcctggctgcgaggaaggcatcgacgaggagggagtagtcgacaggtagaggatcggttctggattcgagtgcccgccaggttctggtcgtcgtacgcgaggtgacgtctgcaaactaggtcacgcagtcgtatccgctcacggccgaccgacaagacctgctgaacacgacctaggggtggcaggggttcccgctggccaggcctgcctcgctcaacgagcgagggacaggccgaagcggcagagggaaagcgatcagacggtccccgacgccccgatctcgcccgtcggcccctcgcaagcgagaggcttcggggtctgatccacttcatcgacggctcccagtcgagactgaagccgtatgtcctccgtgaaggggcgcgggtggagcatcatcgtctcgcttgaagttgtgtggctagtgtaaactagcaagaccagttatctctctatagaaatgaatcctgcagagctggaggaggcaggaaacaagagggtcaaggtcagcaaggcagctccccagagcagggcaagggggtctggaggggacgaactgtggtcaatggagagccagcaacaggtgcggccgccggccggtttatgagggccggtcgaaatctgtgtggctgagctaggctgcgcacgaggccgcgcaccgcttcgacctccgtctgcgcagcgctcctcgactgcggcccagccccttcaccgacgccctgctgtatctgccttcatcagacgggcagcgtaatcgccgatagcgcaaccatataaatcagggcgctctttctagctctagcctgaccagccgcgactcctcgcccggcgctgacactcctcctcggcgtcctcgcaccgaccggcgagccagacgccaaagtacttcgaccggaggaaggcctcgtaaaaggcaataccctgagcggcctcactctggccgcccgagagaagggccgagcgaaaggcgagcgggtggccgtgcgacttgagcgaggcgaggaatgaggtcgacataaacggcttcagtggcggtagccggttctgggcgtcgggcgagctgcagaggcgaggtgggacgacgaatcagtccagcgagtcggtcttcagatagatgttgaggaaggcctaacagatcggtagggatcagggatccaaagtagcgattgagcgggacaagaaatttctcagtcagatgcgagaagtggaaccggacctcgtcggtcagttcgcgggctgaagagagaagtcaagcagtggacgtcaacgacaggtggaagccgactggcccctcctacagaagactcacacgacgcctgtggcgttccgaccgcatgctcccagcgcttcagcagcgccttatccttcccgacgacccgcttccgcttcgtcttgaagccctccttggcctcgcccttcccggccggcgagctcgccggccgcttgcccaggcccggcaggctgacctcgagccgctcgccaacggtgaggacgtttggccagtgggcgcacgccgttcggaagaacgggttcgtcacgccgaggaccgtcccgagcggcggctggtgcgtgttgacaaggagcgagaaggaggcgtcgtggatgtggaaataaggccggaggtctccactcggcggaagcttcaaatcgtcgttggcagcccatagtcgtcagccagcgaagcggggctcgaacagtgggggcagcgcgacgcaccggccgcaagaagtcgcgaagccaccaaatgatttctgagcatgtcttggggtcgggtgcgatgacgatcaatggttctgcgagaataaggcattcccagatgacccagaggctcgggaggagagcggtcgagaagagcggaaccggcggggccaagggaagggaggcgaggatctagggacaccagagcgctcaggatcagtccggcagagcaaattggccagagaggaaagcgagacgcacgttgcgaggtgatggaggggcggtcgctgcttgcgtacgtagtgcagcaggtggaggggctcgactcgacgtcgaagccgagcgagccgtcccattgactaacggcggagcgagcttctgcccaatgggggcttgcgcttgcggccctgcgccgagacagtctcgctggcggccattgctggcctgcaaagatgcggctgacctgtcgggcagagtagatcctggtgaggagccgatcgacccagacgcagcgtgcagtggctgtcctaaagacgggaggtcggccaagctggtcactgacgccgggggtcgtaacagctgcgaggcctgatgccgctcggggatctggacggtgaacgtctcgccgaggaaaggtaactcgagggtcaaccccggcgtggggtcgggcctgtcggagggatgcgcagcaaatcaggctcggcgtacttccgcgtccctgcacagtctgcaagacggatcggacgcaccaggctgagatttcgcggcaggcctgctcgaggacaggttgaccgtgcgcaaaatagagcggcgcgaggaaggcgacgagcgacgagaagagcgacgggtacggcagcggcgtcagaatgacgagcgacttctgctcgaaagcgcggaggatcaaggggtcagccaacagcgccgcctgggggacctcctggtggctttcgtcagagtgcgcgccgtacttggaagtaccctcgtttgatcgagccgtcgcgcttctggacaaagaggacgaagccccacagccgaccatcctctttgcccccgccctcgcctgcgcggacgccttcactgccattagcgccgttgctgtgccccaggcggtcggcgcggcccttgcccttaatgtcggtcgcgaggtcgtcattgagcttaaagctccagccgacgcggccctcggcaaagaggcttgtgtcggggaagcttgagaagctaatgttctcgccaacgccaaggccccagcgccggttcgggtacgtgcgctcgatgacggggccgacgtcgaggtcaaagttgacgacgacaaaagccctgacccagcgctcgagcgcggccgtcgacggcggaccggcgataggcggtgtcgagaggtcgtgcgaagggtttcgtcgcgagcgcgagcgcggcgtcgagttggagcgcgagagcgtgcgctgcgtccggaggagcggcggcgcgagcggcaagaccgtcgacagcggcgggctcgagatggccgagctcgaaggcgaagacgggatccgcaagggcccaaccggtcgggcaggcgaatcgtcggtccgaggtgcgaacgagagcgatggcggccgagggcggtacgaggtcgagctcctgctgctagtgccgccgccgccgccaccgccgccgccgttggctgctcctgagggtgacggcgggaggcggagggccgagagcgacaggtcgccgatgtcggcttcatgcgccatggctggatcggctggggaagagggagagggtaggttgaggaggagatggtcgtgcagggtgctaaacgactccatcgcctttcgagcatggtcctcgggcgcgcggcgcggccgtttgcgcggccagacctcagcagcagcagcagcagcgacacctgcacgcgatcatccattccgttgacggtccttcactttctccctcctctacacactcacccctttagtcagcagtagaagcagcggcaagcgtctccacgaaagacgctctaccgccagccgcgtctggatgccgcccagcggcgcgctcgcctcgtcgtccagccctcgcgtcaagcccagaggacccgtccccgcaggcagcccgagccggagccggtcgccctcccaccgagcccagcaggcgccatccaccggcctccagcctcaggggagcccgcagcagcagcagccgcatccgcagacggtcatgctgccgacgacgctcgacccttcggtcctgaggccgacggcgggcgccgccgcctcctcctccggtcggccggcaccttcagcgtcgggcggcgggccgtctgcgtctgcgtcgacgacgacgaccggcgcctcttcaggcgaacccatcgctgggtcgtcctcgagtggcagcgccgtctcgtcgcagccgctgacgtcgcgcctgcacaacctgctcaagcgtgccccggcgccggccctcgaggaggcggccgacgcgaacgcaccctcggcgggcgccttctcactctcgtcgaccggcggcagcagcagcggctcgacctcgatcctctcgtccttcttctcagccctcgccaacggcggctcgtcgtctgcctcgtcgtcggcgggctcttcagcggccatcgtcgccgacccgggatcatcggcatcgacaggcagccacacgaccggcctcggcctctccatcctcgcagaccccgagctcgactttgacctcggtgccgagtcgcgccgcatcgtctcatccgccctggccgatgtcgacctctcgggctcgtcgacggcactgctgccttcggcgacgctgtcgcatgagctcccggtcggctccatcgagccaccaggcagtagcaacagcgcctccctcttcgaccctgggaccatgacgacaacgcttccagcgacgattgagacctcgcacctgaaaaaagtcaaggtttacgagctccgggccgaggcctggtttgaccgcggcacgggccacgtccacggcctctacgacgagcaggccgaccgggcgctgctcgtcgtcaccggcgaggaggtctacaacccagcggtcgacgacgcacccgcaccgccgccggctgacggagccgagggcggaggctttgttcgcgaggagaaggagtgggggacggttgacgtcggcgagggcggccgcaagggccggtgcctcatgatgagcttcatccaggcccgcgacatctaccagaagcagcagggtaagtgccgagcctcgacctcgcttggcccacgcgcatactagcatgcaggcgctgacatccccacctgcgcttgtccgccaccagacacgctcgtcgtctggaccgagccggatggggtcgacatcgccctcagcttcgccgacgccgacgactgcgacaatgtctgggagtttatcctcgacgttcaaaagatgctcgactccagtgcgtcctggcgctgccccagccgacttgatctctcacgctgatctacggctttgctcgcccccctttgcagcgcgcacagacgacccgctggcgattgaggacgccctctaccctctgggcggcggctcgtcctcgccgatcggaccgttcggcggcgacgactcacccgtgcctactcaccggcagcacacgcgcgagcgcggccggccactccttcccgggccacggctcggggcgatgcgcgacggcctcgaggcggtgcggacctactcacggacggtcgccggcaaggagcgtctcgtcgaggccgtcatcaaggaggtcaccccgactgtcctgctgttcttcaggtcccagtgtagcatgctgactcgattgtgttgaacgcaggactacctcaacgcaatgatcctgaccttcgaggaggccgaggagctcgagagcctcgacgatctccacgcgctgtgcgaaatgatgcgcgccttctgtgagtttcgagcgggtgatctgacgacaagtgcttcctcgagtcgctgactgcgccgtcttcgctgctctcagtgtacacgaacgagccacatgtgctcgaatttatcctccaagaggacctctttgccggtgtcgtcggcatgctcgagtgtgcgtcctagcgacagcctgaccatcatcgtccttcagctctgaccgacctccttcctcttgtcttgatagacgaccctgagtacccgaagctcaaggcgtcgtaccgcgaggtgctcgcattgtcgtcgaactaccgcgaggctgttccgatcggctcggccgacgtcctgctcaagatccatcagacttaccggctccagtttctcaaggacgtcgtcctcgcgcgctcgctcgaggacgcgacactctctatcatcaacagcatcatcttcttcaaccaaaacgacatcatcagctatatgcagtccgagacgccgtttctgcgcgccctctttcgcgactttggtcctgcgtcatcatccgccggggccaagggcgaccgcaccagccttgcttcgcggttcaagcgggccggcgaggaggacgaagacgacgactcagtcgttccgagctcgctcccgagcgaagccgaaccggtcgctccgactccagccggcccgtcatcggcatccgagcagacggccgacgacttccagcggcggcggaacgtgctcctgctgctccactcactcctgttcatgagcaaaaacattgcgctcacgtcgcgactccagctcgtgcggacgctcatcgagcacggactcgtttcggtcctcaaatgggccttttcgtccgctgcttccctccctccggtatctgccgcagcccctgcctcgcccgccttgccaacgcccgacccggatcaaatctcgaatgcggcgattgagatcctcactcacgtcctcgaccacgacccgacggctgcccggaccgtcatcctccgcgaccgcgaggccggcggcaagaaggccgagggtcagccaaagcatccgacgctcgtcgtcgaaatcatcagtctccttgtcggcaccaaagaggacggctcgccgatcactggcctacggacccagctcgccgagggtcttcggcagctccttgacactggcgagggcgagagcggggtgcgtccacgcccgagcaaccccccccccctttcagagagctgctactgatccgaccgttcgctcttctccgccttcagaacgccatctcgcgcggaccagtcaaggacggccccgtcgccgagaactttgtcacctatttctacgaagagtgcattgcgacgctcatggccccgctcgccgcgctgccagactacaagacgctcgacggtgcgtcatttggagcgccacctggccggcctgcgtcgcctcgctgacctctgctctgcctccccccagatcgaccgctctcactccggccggatgaagctcagctccagctcgccttgaccgagctgctctcgttctttgtcgagaatcactcgcacaggagccagtattacatcctttctggcgcgatcaacaacaaggtcgcctgcctgctgagcgcgcgcgacaagcgactccgtcatggttcgttgatctacccttcacagacgtgagcgaccgcactgacgcgcacttttccttgcactcgagcagccgccgtccgcttcttccgggcctgcctcaagatcaacacgcactttgtccaccgctggctcaacaagggcgacatctttgcgccgatcctctcgctcctttcgcgcgaggcgtcggccgacaatatgctttgctcggcatgcctcgagctcttcgagtacgtccgcaaggataacattcggtcgatcctcgacggcatcatgaacagccacggcgacgacgttcgccgactcgccagccggccggtcctcaagctctgcttcgagggcctcatcactcgctgggagcagaatcacgagccgccgccgatagtcgcgccggaacctccgaaggcggcagaggatgagctcaagtgcgtcccttgcgcctcgcccaaagacgtatgcccaggcggtcaattgacctttctttccgtgctgctacaggcgacggagcgagcgtgccgaggaggactactttggcggctcggacgacgaggctgcgacgacgtcggtgaccggccagcctcagcggaaacggcaaaagacgagttccgaggagagcaaggcgtcggcctcgattgtcttcaccccagcctcctctgatgccagtgccaagggcctcgacctcggctacgacgactcggactcggacgacgacatgaaggacggacctgcgacgccagcgaccgacgccatggagctcgacccagccgacgccatcgaggacgttgcccggcagatgtctgaaaagcgacggcgcgaggaagacgacgacgaggacagcggctttggcaagctgctcggcgcaaacggcggcagcacgagaggcggcggccatcggcgctcgggcggcttctcggccggcgcgagcttgtcgtcgagcgaatcgcttcgcaagctcggcgagattgacggcacgggcggcgcaacggcggcgacgggcggtcccgtgcctgttgggccgaatcggccagtcaagacggacggccttggcgagtcggaagcgaagccgcagggcaagcttaagttttcgctcggcagcttccgctttggcggaagcaagaccgacaagtaagggggccggtctgcgtcgcgctcgctcgctcgttcaaggctgtcgcctttccttatcactctggccgagtgcactcttactctcgcatgctcggtcctgtctcgatggctcgccctcgaccccgttccgcactggacagcagactgcacgcaggagacgggtcggccccatgacctgtagtgtcgcccggccacataagaccacgcactcaatcgaccagatcagaggagcatgacagattgggcttcctattcctctcccttcacacctgcatacccttggaccagtcgacggccggcgccgagccaatcgtgccgcctccgagggcaaggctcgggccatgctgtacgaggccctctgtcggccagtaccacatcagcctcggcgcgagcccaaacgccgcctgccgaccgccgaggacgtcgttcgatgctgccgctgctgccgccgcagctgggtcgagcggcgagctcgctacctttgctgctgctgctactgccgaggacgaggtgccagccgcagcgccgcccgacttgcgcgcggcacgggcggcgttgatgtcctctatcgagctgatcgaggcgcgctcctctgcgctcgggatgagtgccgtcaagtccgactggtgagcgcgaacgcaagaggggtcggggcaaaacgatcgttagcgctttgttgggttagaccgcaaaaccggccagcgagtgcaacggccctcgagagccccagaggaaggccgactgacaaagtcatcctgcgagaccgccttgatcgagtaccagtagacgcttgcaccaaaagcagcagcgccgatcatgccgcggacgttacgccagaagtactgagcccgggcgcgccgcatggcaagtgacatggactgtagagtccaggcagacagagagcagcggagttggcaggaaagtgggcaggcgtcagcagctcctctcgagcccggggcagagtggagggcggtcttctcacgtagccattcggaaagtaggtcttggccgccgccctggagcgcacggcaagcgatgggagatagtcgagcacttcacgtcagctccttgtaagacgacgtggcaagctctccgagctaccctgagagggccaggatcccgatgaggtcaggcggccggacggagtcggagtatgcgcacctctcgttgtagctgtcgccgccgatcgtcgcgaccatcgttcgattccggttgagctgtgcttgggtgatttgttgtaaagggaaagtcggtctcgatgtgcaaggcgccggagtgcgagaggggctaggtgtcgtgtgatgtcggtgtcggtgtcggtgtcgggaggccggggtcgagctgcgtgcgggcgggtgaagcgaggggagctgcgagagcctgccgttaaccctaggtcggcactcgagctgccgatcgtctctcctgctaccctcttcattcatggcgagaaggagctctcaagaggtcctctagcagcccctctcttccggcttgccgagccagtatgcgttcagagagttgctcggaagaaccccgaggctgggggccagagcgcgcgggaccgcaccagccagctagtcgagccgagcccgcagcgacccgtcgtcgcacctcgccgaccgccatcactctcatcaaccgtccgctcactcatccctcttcgaatgtcggctctcgagagtgcgtaacattggacacaccagaggctgcgtccgctacgcatcagctgaccgttgcatgctcggctccgtcagaatccttgtttcagctcaaggtgtgtacactcgactggcccgcgcagactgcgagccgactgcgagctcttcccgtcaagtttctggtctgacgtcctctgccctagttcacggccaaatcgctccagcgccagtcgaaaaaggcgacaaaggacgagggccaggagaagacgaagctcaagaaggtgcggcaggagtggccggccgaagcgagcggacgggcaagagtgacggctgatctttgacctcctcgggccggcctgatctgcaggccctgcagcagggcaacacggatggcgctcgaatctatgccgctaatgcgatccgtaagaagaacgaatcactcaacctcctccggctcgcctcgcggatcgacgctgtcgccagccgggtcgagacggcggtgacgatgcggcaggtgcgtggtgaggttggctttggtgtctacgccgctgcctattgtccttgcgctttcgtgtgcttcggcggccgctgaaattgaccttgaccacctcgccacgactcgcaggtgactggaagcatgacgagcgtcgtcaagggcatggacaaggcgatggagacgatgaacctcgagcgcgtacgtcctcggccctcgccgacaagcctgatatggccgacagccgagctaggcgagactcaccgctgattctcctgctcgccattcactccggcccggacgcacgacagatctcgctcgtgatggacaagtttgagacgcagttcacggatctcgacgttcagacgtcgtacctcgagagcaccatgtcgtcgacgacagcgacggcgacgccgcaggacgaggtcgacacgctcatgagccaggtcgcggacgaggccgggctcgagatccagcaggagctcggcgggctcaaggccgacggcctgggcgagatgccagaggcaaaggtggccgagaagcccgaggaggacgacaagctagcagaacggtgcgtctggacgagctcacgcccagccgtatgttacccggcgctgatgctacctctgctgtccccgtcacgcaggctgcgcgccctcaggcccgcgacgtgagacgatccctaatgaccctatttgcgacgacatctcccggccggccttagggcatcgaacggcttcgctgcgagagatattgtgggcagaaaggctggcattcgcattccgccctcccgacactctgagtttacttgccggcccgccgcttgtcgcgcgccttctcgcgctccatcgccttctcctcgccccgctcgaccgtgatggcgccgtgggcggagcgcatccgagcctcgtctgcgtcacgaagagtgggtcagctgatgaagagagacgcgcgtgggaagagagcgacaaggacgcacaggcctgatccttctcgtccttgatgcgattgcgctcggccgagaggaagcgggcgtccttgcggagctcgcggatcgcgcccttcttctcctccttcagctccttgcgcagcttagccatgttgttgcgctcgacgtcggggtcgtagtgcttgccgggcgtgtagtgcgagccctcgaacttgggaacgtacgacggaatcgggatcggcttgtgctcctgcagccggagcggccggcgagcctggaggtaaagccggagctggttggacagcgtcgagagcgtcgacgcgtgcgctttctgtcggtgagcgaagaaacaggggcgaggtgcgagcgtcagtgacaagtcggaggaccaagagcaaagcgaggatttggaagacgcaccctgagcgccgggctaagcttcttgacagtgacgccctcgagaagctccacgacggggccaaagacctcggcaaaggcgtcgaggctggcatggagcattgcgaagcgagtgaggagctgcatcgcggtcgccagcaggtccgtcttggcctgctctccgaggtcgacctcggccccggcgacatcgtcgtcgccggccgtcaggagcgcagcaaggtccggtgtcgagggcgcgagcgtcgacttggccttgagcttcagcggggcgtagcgcgccgagtcgatgtcggccagcgggaagaaactcgggtaggccgccggcgtcgcaaagccgtgcggcgcgagcaggaggacagtgagcgcaaggaagttgacgacctcgggcatgtagcgcttcgacaggctctcgtactgcagagcggcgcagatgcagagactcagtgtcggctccgcacgcgagagtgcctcccgggatgatggggacgacgcacctggaggacgagtgtgcagaggaagaggccgctggcaaggtcgcgcgtgccacggacgcgagcctgcgagaggcactggccgatgtaaagcatcgctggtcggccgacggggtgattaaagtcggacgtcgaccaggtcgtaccgatgacgcgcaggaggccgagctcctgcggccccggccacgtcttggcccgcgggtcgagcggcccgcgggcgagaccgcgcgtcaggttcttctggatgaggccgagctttgcgatcgtgtgctgggccgcgagcagcgggaacgacgtcgtcagtgccgtcaggtggggcataagctcctggacgacgtcgaaagccggggcaggcggggcgaggacgtcgagcacgtggtcgagaaggacggtcaggaagatctgcaggcgctccttgttgccctcgccgagcttagggtggtagagcgcccggatgcgtttgacgacgagcgccgtgtcggccgcagacgagacgccgtgcgtcaagagcagctggaggaaagcgttgtgcgttgccggcatcgggaacgtgaacggcagctcagcccgcaccagagtcgaagaggccgcagcggccggctcggccgacttgctcgacgccttcttcgatgaaggtgctggcggggcaacgagcggcgcgtcggcctcgtccgagtcctcctcgtcgaggatggcctcgccctcgccatcctcgaggtcgtcgaggtcctcatcgctgccctcgtcgtcctcatcctcgtcgccgctctccatctcctcgtcgtcctcggcctcgttgccgctgtcgccgtcgagggcgaccatctcgtcgccggtagcagcagcagccacggccgagccgagaccggcgccgaggccgaactcgtcggcctcatcgcccgagccgacaaagtcgtcctcgaggtcgtcggcgccgcgcttgcgagcggcccgcgccgccttgcgtgacgagccggctgtctcgtcgtcgacctcctcgccgcgcatgcgcgcaagccgggcctgctcgagccgctcgagctcggccttctcctcgagcgcgagctcctcttccgtcttagtccggtcggtcggcttggcccggcggtcgtacgcgagcgagcggacgaacgcgtcgtagtcctccttctcggcgccggcctcggtgcttgccgcctcggccttgggcgccgtgaaccccgtcacgcgcgtgccgagggggatcaggttggagcgcgagccaccagcgtccaggttggcctggtcctgctcttcggccgtcgagtcgagtcccatgagcaggtctcgcagctcgccaaactcgccatccagcgccgcccgcgtcgcctcgtcctgctccttggccagctgccgctcgtacttgtggtccttcgacttggcaatgatctcggccatgacctcgctctttgtcttcttgcgctcgggcgcgtctggatcgcgctcgtcgtcgtcaaagccaccaaagtgggcccgatcgaccgtgttagcgtcgatgcgacctgcgagcggcaagcggtcagtcaaggcgaaagagagcgacgagacaagacaggagaggcagacgcaccgctgtccatatcgtcgtcatcgtcgccgagcacaccaccgcctccgccccagccgccctcctcgaagtcgtcgaggagctggccgccgtgagtgagctcctcctcctcgtcgccgtcaccgaggttgaagagctcgcggccgcgccgccgtccaccctcgcgctgctcacgctccttctcgcgcgtgaaacgctcgagcatcttttcttcgggcgtcaggttggtgttgttctcgccgaaccgtgagtcgatgaacgaagccgtgtggcccttgtcgagcagggccgggaggaggagcgcctgccggttcgcgagccccttctgggcggcgagacccggccgtccgctgctccccttgagcgccttgcctcctacgtcgtgcttgacctacgacgagagtagatcgggagattgagcgtcagctgccgcgccggcggacggtgctcgaccagcaacgcgcgagtgaagagggggcggtactgaacgcacccgcatgacgcgctcctcgaacgggttcatcgccttgcgaatcttctcgagcgccttctcctcatccttcccccgcttgcgcttagcgccgcctgccggatgtgagtcggacgaggcacgcttgccgttggcgccgcccggctgggacgtccgcgagaggcccgacgaagcgagggacgccttgagctgcgagagctgcgaagccttgcccatcgtgtgctggctgccttggaggagcggtcgagaagcggagcgagacccaaaggagaaagagttgaggtcgtgggcagcccgaggtggtgtagggagggatggctgagctcgggagaggtcgcgacgacgagctgggagaggccggctggctgcgcgggcgagcccgcctccaatttctcaacagtcgatcccgttgaagttgccgcgcgccggaaatcgccgggggggggggtctagctggacaacccacctgccttcgaagcctcgcacgcctcagcacccgccccgtctgacacattataggcatggatagagagctgagacctctagctatttgctgatgcaagacgtcgcaaacggtctctgttgagagccacagctggcttcaaggcggaaacggtcgattcgaggctgctggaggcgctgcgcgcccgcatcctggccatctcgccactagaggtcgtctcgctgccgaacgccagcatgttaatcgatgagggagaatgcaggagaaagcagaagagacggtctatgtaccaagttagcttacaatgtcgtcaggcgaatcgattcgtcgcaaagcagctcgaagcgcggaggggcgaggtctgaggtcgcctgaggtcgatctcggcgtcgccggatcttggcctgctcttcactgtgtttcaatattgttgtaagtggtatgcgctgatagccttgcctctcctctacctcatagtacgagcctgagtctacatatacagttgttcgtgtgctatgacgggttcaaggcgggcggaggcctgaaataagaccccccccccacgatttccgccgcgcggtaacttcaacgggatcgacaggaacggcatctgcaactcgggccgagcacaggccctgcgatacgccctgttttcttccgtcgtcgctttcgccgtccaccttctcgaggccaacctcgtaagaggggagaggaaggcattacagaggctgctggagtccgcgagggagttggagggcccgtcaggcacgcgggcggggcctagcgagggacggctgactgccacggcacggtcacaagagagaaggtgaaccatcggatcgggagcaagggaaaaaaggaggcgcggagctagtggtcgatgattgccaaattgcccgagacgagctctgagaggaaaggaggaggaggagaagggcgaaggagagcggagaatggaaggcgcaggaaggaggagcgtcagtggggattctcttccaagtcgcacgcagcacgcactgttctcgaggatcgagccgtcggggatctggatccggttgccctcgttggcgacaatgatgacggtcccgcgaagggtaacgttcttgccaaagacgacgtcgccgttgatctgtagcaaggggagagaatcaggaccgagcggcacgagacggcgcggaccacgacgaacggtgatgtggtcggcctcgaggatcgacgggatcgtcttgaagcgcttgctgaaggcagcaaccttcttgaaggtgtctccgagcttgacgaccggcgtcgtcgcaaagagccgcgacgagttcatgacgagcgcgccctcgttcaggtcgtacaggtccgacttgatcagcagcaggtccgagcacgacttgaccggcaggaagcgcgagcgcgggacgttgatgcccttggcagccttgaagtgcttgatggcggcaccgacggccgtctcgagctggatgaccgcccggccgtcgtcggtgaccttgttgttgacgctgcgggccgcaagcaacagtgagcgggggaggaaaggcggtggggaaggcggaggaggagcggagagaggtgggaggggagcgaggcaggcaggcagagaggcaagggtcagcgaggcgaaaccaagcaaaggagcaacgcaacacagacatgatctccatcgagagctcgcgagcctcgacgacacgcttgatcgccttgaggttcacccagaggttgttagtgttgaagatcttgaacttcttcaccgacttgaagtcctcgaggtgcgcgtcgggcacctgagcgacctcgagcaggcgaatgtggccgttgacgttgacgagctgtgacggcagatgcagagagtggtcagcgggctgcgcgacaagcagagtcgagcaagcagggacgaacggttccgcccttgacgtcggccttggtcttgtcggtgacctccatcaggtactcggagcccgaatcgaccatgtagcggaggatgttggtgtcgacgacggcgccgaggttgtcgacgtttgagacgaagaggtgctccttgccggcggcgagcagcttgtcaatcaggcccgagttgtagagggcgtcaaagatgtcgccgtgccccggggggtaccagttggccttgtcggacgtctgctcgcgcgggcagggcaggagcgactcgcggtcgacgcgcgggtacttggactggttgaacgtctggatgtcgatgttgtggttcttgtacttctggatgatgcgcgaggtgtcgtcgtccgtgttaaacgagttcatgaggatgaacgggacgtcggtgtcgtctgcgagagaagaaaaacctcaaaagtcagcgcgtgtcaggcgactgtcatccgcaaaaaggacggacactcggcgttgagggcctcgatctgcttgaccgagaggtcgaggaaggtcatgccgtcgcggacctcgatgaccgacttggggccgacgcagcccatggtcgtgccgaggccaccgttgagcttgagaacggcgagcgtgtcgaggatcgacccgttgtcggccttgggcaggtcggcatacgggatgatctcgtccttggctggcgggtggacctcgtcccagacgctggacgagggaacgcgatgaacaggtcaggacgatggagatgggtcgcgtgcgactaggcgcgggcaggcgcacagcttctctcccttgcccttctcgagcaagaagcggtggaagagcgagtggaacgaatccatctgagccttgaaggcctgaagagcagctcggcggaaaggacgatcaaagggggcagagaagaggcgcgagcgtcaatcaccctgggaggagctcctgcggccctgtcttagctgaggacgacgcacggccttctccgtctcgtcagagacgttgtcgatcatgcgcgtgagctcggtctgcatggccttggactggttctcgataccggcgagcttggcgtcctgcaagaggcgatggaagggcaaggttcagctgttgaactcgctggtcgcgccagcttcgacatagatgggacgactgaccatgacggagtagcggcgcgtgggcttgccgctgacggaggtagaaggaggagaacgggcaaaggtgtaagcaacgacgggatttggaggcgagcgatggttcggagaaagggaggatgggatggagggctgaatgaagggaagagatgccgccggctcaggatgcggtcgaccgggggctcctgccctcccccgcgcgaagtgcgagcagggctggtggctggcctctcaacggcgccgtcgagcaaacaagcacggcgccgggctcggaaaagcaaagcgttggggcagacgtacggaacgggcgaggaggtagcgggcgaagccatgatgagaggctttgggcgagggctgcagcgagggttaaagaagatgggacgtcagcggcggagaacgacgactcttttcacgcgccgcgcctgccggatcgagagctcctggcttgccccatctctgccgccgccggcctgactcggtcacatcggacgagcagagacggcgaggcgctggcctgccgagtcaggcaccggccgagcttgctcaagtgttgaacacaagagaatataggcgaggtaaagggggcgacaaaggccgtggttgagcgacccggccgtcggagggacgagggctcaggcaaggcaccgaaggcacccacgacagtcgacatgggcagtcgagggcgccgtgctcatccaggcaggcttgaaggaagcgaagcccgcgcagagctagcgagagaagatgtcgactcacaggtgaaaagaagaggagagggtggtgggtgacggctcaaggacggagagttggcagcctgcttgctgtcctgagggccaaagggcggggcccgaacctcgcggcggacaaaaaaagaaaaaagggtcaggcgtctcgtccgccgcgccggcggacgaacgagagagcactcaagtgcgtcgaccctcgaccactcgagacgcttgcccgagatgccacagcagcagcagcagtcgtttgatctccagcctccgtcgtcgtcgtcgaccgccatgccgccaccaccgccaccgacgccgtcgaccgagccgcgtgggacctcgccgccggcgacgagctcgtcgtcgtcgctcctgcacctgcttgcagccgcctcgtccaacctgccggccaagatctcgtcatcttaccacctgcacgagctcccagctgccggtagtcctcgaagcggaactgcaggcactgtcggtggccagttagctgccgagggaggcgcctcagggtcgagcggcctggggacggccagcgtcggaggcgcgtcgggcagcggcggaggctctggcggtggactcaagcgcaaggcgtcgtcctcggtcggacccgaggataagaaggagatcaagaacggcaacaacaaggtcacgctctcgtgcgccgagtgccggagacgtgcgtcccgtcatgaagcgggctcctgccgcctctcgtggtcaggagtcggcccgaactgcgcgcgcgcctgctgctgactcactcgaccgccgtcctccttacgatacacagtcaagctcaagtgcgaccgcgtctggccctgctcgagtacgtctctttcgccgatgaagggcacccttctgtcgctcgctgacgcctaatctcaaccgatccagactgcaagaagcgtggcgtcgcgaccatctgcccgaacggcgagctcaagggcggcaagggcaagcgcctcatcctcgccgacaccgaagagcttcatgcacgtatctcggtcctcgagagcgctctccacgagagccacgctcagctcacgcgggcgggcggcgctggcggtgccggctcgggcgagggcagccgcgagggtgcagggacgacgcacccgctgctcgattcgagcttccactacgagccgctcgacggcggcagctcagccaatggcgccggcaacggtctctctggcgaggtcggtgggccgagcgggagaggatcgcacgcggctggtggctcggggggggcaaagggcaaaggccgcgagctgctccacccggccgagcggggcgtcggcgaggacaacatcggtcgcctgtctgccggccgcttctttggcggctcggccggctcggcctacttactcagcgagagtgcttcgccgacggcgacacccccagagacgacgccgcacggctcctcgcacgcctcgcctcagtttgacggaccgacctcaggccctttggccctgccctcgagcgtagctgcagccgccgcagcgcactctgccgccatcgcgagcgcggcaaccgcgcgcgagatggacctcctgcttgcccagctgccctcacgcgagcaggcctgggcgctgtctgactcgtacttccgcaatggctcgtggatgtactgcgtcatcaagcgtcggacgttcgacaacgacttttatccgctcgccttcccggccctcggcctcggcgccggtcggccagtcatcacgccgcaccagctcgccctttttttcatggtcctttgtctcggcgccctcttcgacctcaacctaccgccatacaaccagctctcgaagcgctactatgcgctcgcaaaggcggcgctcgcgctcgactcggccggctcgataatcctcatccagacgatcatgttgatggggacgctcctactcaacgagcattcgcacgcgacccggggtggtgaagagtactggccaatgttgggtctcgcccaaaagcatgcggtcgcgctcggcctccaccgcgacggccaaaactggaacttgccaaaggaggaggtcgacgagcgccgacgcgtctttttcgagctcgacacttacgagacgctccaggcgctctgcctcggtcggccgaggtcgctcgcgagccatgcgatcgatacaaaggctcccgggagcaactcggaggaggacatgaagagcgagtcgatttgttcgtcgcccttaccttccactgacctccctctgcgcgtctctcgtccgagcgcatcggctgacgctccctgacttccctctgcctttcgtgccctctagtccatcaagcaaaagttggtcgtaacggcttgctccgtctcctgtcaggacgctgaccatcgctgtcgcgccctcccttttcaccgcagtacaagctgctgccgctcatcaagcgcgtcaacgacctccaggtccagacgacgccgacgacgtacgaccagattatcacgctcgaccaagaattccgcacgtgtcagttgttctctcggtgaccgtcctgaccagggcctggagatgcgtgacgctgacgaccgccctgcctctgtcgcctgctagttgagcgcaagctcccggcggagctccattgctcagaggattcgtgcgtgcttccgacggatggcaacggctggatcgacaagaccttgatccttcagcggcacgcgatgctccttatgatcgtgaggtcgtctgcgccgtatgacgcagaagactgcactgacacctcctgcttgccctactcgtcagaacgagtcgcttttgttcctccaccgtggctggtacgtgcgctgctgaagcctcgagccctctcttactctttgctgatccgaccctgcttctgccacaactaggttcgcccgcgcactgcgagacttcccagatgagccgcttaaggcgcggtggagccggagctacatcgccgagctcgagagctgcaagaccatcatttctgttgtgaaggacgtcctgcagctgcaagggtgcgttcgacttgccccctatttggcgcggcctcgagctgactctccgaatattgcggcaacgaagaccgctcgtcactcggcactggttcccgtggtttcactcgatgagtgcatcggcgtccctagctgtgtcggtcatccgtgcgccgacgagctcgctggcactctcggcctttcaggtgtgtctcttcgccaaacggtccttctccttcccctctgacgccttcgcattgctgtttcgggaataaaggagctcgagaacggggtcgcgctgtttgagtcggctcacgttggttcgcgtccgcgagatgagctagtgcgtctgcgtgcgccgactcggcgacgatgcctttgctgaaccaaccccttgaacccgattgtgtcagccggtcctcaagcggctgcgtgatcgagcagcggagaagctcgttcttcatcgctcgggcaacaagaagggcaagaaggtgctgaagtcggccaacgacggtctgaccgacaacctcgacctcgacctcattggagaagactcgcaccgcaggcggtcgggcacgcacggttcatcggcggccggccggccagcgtctgcgaccgcggccgccactctggcggcgcagcaagccgacctgccgagctcggtcccgctgccagaccccgctgcgccggatgcgctcgagcagatgaatctggtcgccgcccagttttcgctccctgccgcacccggcagcgccggctcgcccgaccagccgctgcatgcgacgcctggccaggacggcttcttctttccgacgacactcgacgaggcgatcgccgcccagcccaactttccgaccgacttcaacgaattctcgtcgtggacgtccgacccaaatttcggcatgggcgcggccggcgggttcggctacggcgaacccgagcggctcggcatgcaccccgctgcgggaggcggacctgtcgacgactttgacttcgactctgtgcgtccccgccgtcccttgccttgccttccgagtctcgcccggctgattctttggccttgatctgtcatcgtagttcatgcagggcatcggtcaacctgtctttcgaggtgcctgagttgccatttgccaagaagatttatgcccgtctctgccttgccactgcagctcagctgcagccgctcgggatggcgcctatgcgtctccctttgttcctgctcgatgagaagctgcttccgttctgactgggtcgcggcgaccatctgccgctgttgtgcgacgtcgtgtatgcgggcgcacgccgccgggccaggggtaattcccgccgaggttcgatcgcctcctttgacagccggcagccccgccggcaggcttcagctcgccccttcgacgacactttgcgacctgctctcgagctcagccgctagatcaggctgcgagcgatgcgagccacatcccggcccgggccgctacgatggagcgagcgatgctcacgctgattgacgcgagggaagcctgtcgccggccggccggcccgtcgtcggcttgttaggggtcggcgagccaactaaacttgcagacaggcggcgtcgtccgcccaagctcactgtctgcctcgggcgttggcgcaggcaggaataccgctacgcccggactgtcgcttcgcattggccgacccttgaccgtgcgggccgcacgctggccgttcggccggtggcgtcgggcgtcggtcgaaggcgaccgtccgctaggctactttcgcccagtgttgcgggatcacgcacgcccgcaggtcgcgagtcaggaggcggccgagccctcgtactaccgacgccgtctgagggtcgacggccctgtccgcctgaagcgctttcacgctgaccacaggggccagtcggccttggaaaggggcttcagcgggatcagcagggcgctgcgcgcaccagaggactgccgccccgacatcgctccctcgtcgcacggctgacttgacggtaaacgccgtcgctctgctagcggcctacaatcaaggacgcctcggacgacgaaggttcaggccttgcaggccggcgagaaccctctctcggttgcgctccttgccatctcggatcggcactagcccctgactgccgtcggcggctatacggcaaacgcccggcccgccctctcgagaccgtcgagctctccctttcttggcccgctccccggcagggatgtgatgggagaggcgacccctctgcacagtcgagaaagaagaagccccgctgcgctgctgaccgccacccggcctataaagctgacccctcctcgaccgacctttcgaccttcttccctcatcccccgctcactcctccctaccttcccccacctcctccgagcacgatgaagctcgtccttctcctcgccgctctcctgccggctacggtcctcgcctcgtcgcccacccaaggcgacctctcggtcgaaaagcgagccgtcaccggcgttaccggttctgcttacggattcgcaaccggtacaactggcggcggaaacgtgcccggagtacgttttgcttgctgctcgcgttgtcctagagctgtaggctagccgctgatgcttccatctctctcgtaatgcaggcctacccctcgtcgcgggcgcagctcgtccagtggcttgaggacagcgttccgcgcgtcatcctgtacgtctcctggctgagccgaccgtcatatttgggtccactggcatcgtcagtcgctgacttgccacgctcacagcatcaactcggagcaagacttccgtacgaccgaggtacgtgtcacgactgtcgttgtccttggccgcacctcgctgacctccaccttctcgtccttcagggagcgcctgtcactacttggggctgccgccctaccagcaacaagtgtggcacctctggccaggacgccatcaactcggccgactggtgctgcaacggcaacgccggctgccggtcgtctcagtgcgccgcgaccagcgactccacgctcaacgccctccccaagtgctcggttaccgtcacgtacgacccggccggcctcaagccgatcaacgtcggatcgaacaagtccatcgttggggtaggcgccaacgctgccttccgtggccgcggtatccggatcagcggctcgaccaacgttattgtgcagaaccttcgtatttacgatctcaacccaaggtttgaagccctcctacctttcctcctgccttcaacgaacactgctctgactcaagacctcgctctcttagcttgatctggggaggggatggcattacgctcgttgacaccgaccgcatctggctcgaccacctgtaggggcattcccctgcttagaagcccctcgctgctttgctaacgactcttctttggcctgttataggactctcgacacccaaggccgtcaatttatcgtgaccgggtataaacctgcgcgtcgcgttactatcagcaacgttctgctcaatggagccactaaaacgtctgctcagtgcaacggaaaggtccgcccctcccagcttgcatcgtctatgcatccgacactgatcggcctgcgacgatcctcctatccttagcactactggagcatgctgctggtgcgttggccttgcatgtgtcgcgcctgctctactttgtgctgatactcaggaaacctcgtcttcgcgatcctaccgcagctcggccagggtgataccgtcaccctggactcttgccacttcaaagacctaagcggacgcggcccaaagctgggcgggccactcctgattcacgcgtcagtcttggcttgatctttgaagttctttgcgcgttttgtctgacgccttgacttttcttcgcgcgtcctgtctgacacaacatcgcgctcggcccccaccagtgtgaacaacttcttcgagaacgtcgacggccactccttcgacgtcgagaccggcgtcgagctcatcgcagagggaaactatttctcctcggtgaagacgcccctgctcgccaagaacgtgcgtcctcccttgtaccaccgagtctgtcccgaatctgaccatgttgtcaatcgaccgaacagggcgccatgttctccgtccccgccggccaggagtccaagtgctcggtcgccttcggccgctcgtgcaaggtcaatcagctcgtcagctcgggtgcgttctcggccaacgaccagggcttcctgtccgacttcaagagcaagggctacattgcgccggccgccgaggacgcctcgtccgtcccggcgttcgtccgtgccaacgccggcgtcggcaagatctaagctggtcgtcgctccctgccggactgcagttccgtctcgcgcgtcgcccgtctgcctcatcatcgtctctcgcccgccttctttccttttgccttctggctgtggtctcttgcgagactgtctaacccctcgtgtctcttttctctgcgcgccctccccggcggccctctttcatgctttcctcgacctctctcttcttccgcgcgaagagcatgagcggcctctatcgtccgaagcgccttgacgtctgactgagagaagcaagacttgcagccagcgcagccagcgagaaggttagattgaggaaaggtgaagtcgtcatagatgtacacgtccaggccgcagtcgatagcgactctgctcgtccgtcagcagagcagcttgaggccgccgacgcgaggagtcgcgcgctggcgagcgaccggcgcagcgcgcttgagccagcagtgatcggcctcagcggaaagggtgagcgtgcttcctgcatcgccgcccgcttacttggatccgccgagctcgacggcgaacgcgacagcgagcttggagaactcgagcatgtggtcgaactacaggagcaggagggaagcgtcagcgagagtcaacagcaagaggctcgacgtcgcggacgcaccgagaactcgtcgctgatgtcgagcttgtcgttgccagagtggatgttcttgttcgagtcttcgaacgagctctcgatggtgaagctcgactggtagccggccttggagaacgaggcgtggtctgcagcagccggacaggggagtcaatcgaccgcgccagcttgcaggccaagaaatgagagacgcaccagagcaggcgtagccgcacttagtctcaacccaagggatgtcgactaagcaagagggcggaaagggcgagtcagcgacgtagagagcgagtatgatcaagtggagattgcatcaggacggacggtacttgtcgatgagctgcttgttgaactccgtcagggatgcgtcgacaaagtcggtgatgacgccgacgctctcgatcgtgccagccttgacccaggcagtcatgtccatctctgcaaatgaagaagagggaaaggtcaaccgctggacgaggatgacagcgatcaagagagccagctcacggatcatcgccttgaccttgatgccctgctcagcgtagcgctgagcgattgcctgcgagccaagcagcccgccctcctcaccgctgtaccagtgaaactcgacgggcgtcgtcggctgccagcccgaggcgacgatggcgcggaaggcctcgagcgtcgtgacggtgcccgagccgtcatcgtcggcgccgggcgagcggaggaagggcagcatgttggtcgagtcgcagtgggcgccgacgatcgtcagcggctccttggctgcgtcctttgaggccggctcgaagcgggcgatgatcgacgtctgggaccaggtgtgcgggaaggcctggacggtgatgcgcttctggacgtccttcggcgccttggcgacgtacgctttgacctgggcgaggagccactcggacgactcggtgccagtctttgaccggtagtagcgcgtaaagaaggacgtaaacttttcgaggttcgtccgcggctccgtcgttgacaggagcttgaggatcggcttgaccgtgtgggacgagttcggcgtcgggtactcgtgcgccttgttgagcgtcaggtccttagcgaacgagccgagcgagacggcctcggtactgttcaacaagagagatggaggagtcgcggtcagtacccggctggctgcacgcagccgcaacaatcataggaggcgacgcacacgtccatgaacttgcggccctttgacttctcgatgagcttctggcgctccgacatccagaccgggtcgtcgtcctcgctgaacgagacgagccgcacggcgtcgaggtcgaggtcgaagcctggcgggtcgatgcaggcgtcagcgattggccgtctgcgctcgggtgtcctgaagcgagagacgcaccttcgacgcttccctcaaactgggcgagctgggcgacaaagtcgcctgagacggacgcatcgggcacagccgacgacaggactgcctgctggtgctgctggttctggaggacgagcggcgcggcggcggcgaggagggccgacgatgcgagtaccgaggcaaaggcggcagctgtccgcatggtgtgtgagaattagaagaagtgttctggggtggtgtacggagggtgcgagggtcggtggtcgaagggaagccaggtggcgacggctcaagcgagcatcgcacaacgcggcgtcggctgcggatcactcccgtctaagccgtctcggcgggcccgcgagaatcatctatcgaactcggtgcgcgcgctgaaaacgaccggccgcgctgctatcgtcgcctggcctccaaccaacacctcccttaggtccgtaccccccctgaggtcgcctgctctttcgcttcggagctctcgctgaccttcttttttgcttcctctctgcagagtcgctttgtctctatccattcgcggagtagcgaggcgctacggagcgtgtgagactgttaagcgtcgagcccaccttcgggcgggctgccggcaagggttcaaacttcggcctgcgcgtctacacgcgggcgggatgatatctttcgagtcgggacattctctttcggcttgctcgtctgctctttgggttgacgagggcgcgagagggaccgagatggtctgcagccgggatgaggaaggctgaattggcggcgggggcgtcctgttccgcttcgtctgctcctatgccatgcccatagtttttaaaagatctgccgtttcgttccgttaacacctgcgacagcgacagcgacaacaggtgacgcgtctcttgacctcaacggttctgccagctcggccggcgggaaggacctgcctgtgccgccggcaccgcctcacgcgccgccggcttgccccggcctctcagcgactcgacggccacccccttcctctctcgcacgactcagccccccttccctcctttgcccacggcctccctctcacctcttagcatggccgacgctgcggaagatgtcaccaactttggttagccccgcccttccatctggcctgaggctcgaggcccgggagctgaccgcctcaacggccttcctcgccgccgcgtctcgtccgtccaggagccctctggcaggccttcatcatgattgtgcgtttccagactcgcggtcctcgcgacggcctcagtcgtcttgctgacattgactgactggccctctttcaggtcgtgtcggagatcggcgacaagacgttcctgatcgccgccatcctcgcgagccggcagccccggctgacagtcttcagcggggcgtttgctagtctggtcgtcatgagcgtcctgtcggcggcaatgggtcgggtcatcggcttggtgccgaaagagtggactcagtttgccgtgcgtccctccgtccttgactactatgtagctcaaacgaggctggccggccactgatgcgagttcttccctctgcgcgctcgcctcccccggacgttactccgcaaggccgccggcctcttcctcgtctttggcgtccgcatgctgcacgagggcctgacgatgtcgaagtcggactcgtccgataaaatggccgaggagatccgtgaggtcgaggaggagctctcgggcgcggtcccgctcgacgagctcgaggagggcaagtcgtatcgcaactcgccctcgcgaccggcctcgccccgaggcgaccggggcgggtcgtcggccgggggcagcatcggcgaccgcatgcagacgtacctcggcctcgtcgccagcccagtctttgtccaggcgttcgtgctaacgttcctcggcgagtggggcgaccggagccagatcgcgaccatcgccctcgccgctgcccatgtacgttcgcctggcttggacgcctctgccgagataattcgctgacccccaacgtcgccctgctgctcgctcatcaagaatctttacatcatcgctttcggcaccatcatcggccacggcctctgcacggccggtgccgtcgtgggcggacgttggctgtcgactaaaatctcggtcaagtacagtgcgtcgtcgtcgtctcctggttctgtcacttctctctttttcctcacccgactcaccctgttggcctcttgctttgcggcagtcaccatcatcggcgccgtcctcttccttctcttcgcgctcctctacttcggcgaggcctacgagtcagcctttggcctcgagctgtcggacgcggtcggcgccggcggaatcggttttgactcgcggaagtaggcgacctcgcagtaggccgctttgggacagcgcaggcccggtcctggagggatgggtgaggaggcgcgatagacggcgctcacgcaggagcagggtgtgccccgcaagcacccactgagggaacatgatgcatgcctttatctgaacgtcggccctgacctgcctatctccgagaacagaggcggagagacgggcacgaagccagtgtgccgcttgcgatgcgtcgcgatgctggcggcggaggaggacgcgacgacgtcggcgcgcgactgctcgaccttctgttctcgacagcaacagcgactgcctcgctttaagctccttccgccacgacttctcttgctttgcccagcatgtctgtctcgcgtaacaagcacttcgtacgtctcggacaggactgctgctaccgtcctcatcgtcgtctggagggaggccgggagccggagccgtgctgacgcctcgacctcctttgacctgccgcttcgctacctgtccctttcttccgctgccgcaacagcaatccttcacggtcggcaaggtaagtcttttcgctgctccaggatgtatgcgcacaaagatctgctcagctccgctctcggcagctgagaggatggctttgccgagcctccgagagctggttcgaaccgggcctgcgcaacccgaaggtcatctccctcgcctgacaacgatctttcggctgacatccggacctggatcatcataacagctcgatgcgggtatggtatgttgctgggattgccctctgctatccgtcacgtcttagacgctgactctgatgacgctcgaacggcatcgctgcacctccaggcggtcagtccctctcgcttcgacttcgttgagtcccttacgctatagctgacccgcatcctgtctcgcgcccaacagatcctcatcggcgagcgcgcccacctgatcgaattcccttccctccttctgccggccgggaccgtctcaggctccatcgtctcgatatcggtccttcgcgaccatgccgccgagcgcagccacacggccgccttcacgagcctccaggacaacattctcgaggcctacggcacgcactcgccgacggcgcctgtcctctcgcttctcaacacgacgcagacgagcgtcacgctcgaatggggtcggctgaacctcgcgagcgcaagcctgcacagcgtcgagatctaccggaacggctcgcgcctggccggcatccccaacccggccgtcaacacgagcaccaagctcagcagcctccagctcgacaccgactacacgtttcaactcgtcatgtgcgtcttcgtccccgctgcctcgacgctctaaggcccaaaaggcctcgtgacgctcgctgatgccgcttgcgttgccactcgcaggaaaacgaccgccggcacctatccctcgaacgtgatccgcgtacgcacgcacacgatgaagtgcgtcgcaattttaggtcgacgaaacagctgcgattgctgacaccctctcggctctgtcacagcgacacgtcgggcatctcggtctgttttggcaacgtccaggacccgaagctccttcatcaggcgcaggttgcgctcgaccagatgggcgctcgctatagtgacaagatccaaattgacacgacgcactttgtctgcacgacgccggccggtccgacgggcaggtgcggcttcacctgcggctcttgagcgctgcccagcgccgagactgacaagacaccttttcaccactcagcggcccgagcgtcgaataccagaaggcgctgcagctgacgctgcccgtcgtcgagccaggatggatttttgcctgcatgcaggacaaacggtcggtcattcgaccctctgccctccaccgaggaggcagtcactgacccgcccgccgctcgcgcaatccaggatggtcccgatctcgcagcatctgctcggctcgaactcgacatacaacccgatcagcaacgcctcttttgcgcgtctccagtcgagctccaatccgagctcaccgcagagtgcgacctttgcgcagaacggcgccgagattgagcgtcagccgagcccagagtcgcgggcccggagctccatccccgataccgtcagcccgggatcggtcgcgcccgaggaggatgcccggcccgtcttcgagcgccctcctagtgtcacgggtggcaagctgaaccgcggattcaagtaagtcggcatgcggctcgcttcgttgctgcagtcaattgacatcgccgtcccgtcaccgcctcgcagattccccctctcgaccgacacgctgcctctgcagaaggaggacgaggctccggccacttctaaggcccctgcgtcaccggcgcctatcatcgccgctccggccgtcattctggaggacgactccgacgccgaaacgaccgcggcgccgagcgcggctcagtacgtctcggagaagacgccgaccgcaccgtcggccgagttccaggtcgtcgacgtcaacgcgccggagacggtcgtcgtcgcaacggcgagcggcgagtcagctgccaagcccgacgctccttcggacgacgccgatgagcgccctcgtccgtccgtgcccgaacttgtcttctcgccgccgccggaggagcagagtgcgccctcccttcccgtcccccccgcggccgagctcgaggcttcctctcccgcggatgaggagcacgaggtcgagccgacgccggcagaggcggctgtcgaggagaagcttgccgaggatctggtcgagggtgtcgagagtgctgcggtccccaccgacggcgccgtcactccggccgccgagctcgaggctgcgacgcctgcagagcagacgaccgaggccgaggccagcccggaggaggcactcgaggaggttaagctcgcagaggatctcgtcgagccgtcagccgagattgcgacgcctgagaaggaggacgacgcgtcgactgagggcctagcctcggccgatgcgacagacgacgataccggggccgacggagcggcggcagaggctgctgatctcggcgccgatggtgcggcggcctctaagccgaagagcaagaagagcaagaagaagaagtccaagtcgatcgcgaagtagggcaccttccctttgatcgatggctgttgatcgagcatggcagaggtcaagcgggaggggaagggtatcggacaggaaacaagcacagagtaggtagggaggcggatcgtgacagacgagacgtaacgagtgcaaaggtaaaaggagattggcgcggcggcggtcggactaccagttgccgccggccgagatggggaaggccgcgctcgcaccactcgccccgccttcactcgtcgagccgctgccattgtcgccgctgtcaacctgcatagcgccgcctcccgacgagttggccgctgcgctgagcgctgcgaggctgccagccgggttgctgcccgggagctgcgcaaagaacgaccgtttcctccgcgcgcccggaagaccgctcgtgatgccgagaccaccctcgtacggctcggcgacctggggcgaccgctttgcagactgcccgcggcgggccaaaaagttagaggcgagcgcgtcgctgaacgtcgtgcctggcgtgtagcgtgacgacgacgcaaccggctgctggttgtcgtgcgagtgggcgtgcgaatgcaacgacgatgctcgcgatggctggtgattgcgcgagccggccggccgtgaccgctgcgagcggccgtcttcctcgtccgtatccatccgagagtccgaatccgagtcgccgttgtcgcgccaagagcctgcttttgatcggctctgggcgtcgtggatctgccggatgcgctctgaggcagtcgagcgaagggaggatgagaggtcagcgagcggctcagactgtgcggagacgcgagagcgcgacgcacggttgatctgacgatctatgtcgctctcgtcgcccgagtcgtcgtcgtctgcgaggaagccgagctcctgcccgaccgactttttcggcacctcctgcatgcctgctgacggggcgaacggcatgctccgaagcgcctcaaagacacgggtcctagagaggttatgctgtcggtcagccactgctcgcaacgcgacaaaacaaattatgatcgcgacgcaccggatgttgtcgagatactcctttgtgttctgattctccatgttgctgctcatgacctcgagcttgaagcgcgggccaaagtactcgaggctgtgagtcggtcaaggccgaagcgaggatcagcatctccacggctgggcgcgatagaacgagtaagacggactagtcgttgtacgggagattctcatcgagctcctttccgagaacgacgcccgtctcgtacgtccaggtccgtgcgacattctgcaccaaggtcgcgtcagtcaaggacgcaaggtgtctctgcgaaagaagaggcagcgcaacgcaccttggtcgtgtagccgccgccgccgacgagcataagcggtacgttgaagctgttgaggaagcggacgcagtcggcatgccccttcatgcttaggttgaacatgccgagcttgtcgccagcgagcgagtcggcaccgcattggaggataacggctccaggccggaaccagtccatgatgcgctggatgacctggagagagcgacgcaaaatagagtagacaatgtcagtggcgcacgccagaagccggcggtctcgacggcagacgcacgggctcaaagatcgacttgtacgcctcgtctgtgatgccgtctcgtagcgggatgttaacggcgtagtttttgccgcgagcgatgccgacgtcgcgcacgtcgccggtgccagggaaaaagtcgccaaacttatggaagctgcacgtcatgacgcggtcggtcgagtagaaggcctcctcgacgccgtcaccgtgatgaacgtcgatgtcgatgtagaggacgcgggggtggaacctaggatgggccgagatcaaagcaatgatcagcgactgctcaagtacctgccgctcgagcgagggcgcagagtcagacgactcacctcaggagttcgagaacggccaggacaatgtcattgacgtagcagaagcccgacgcctcgcgtttcttggcatgatgcaagcctccagcccagttgatgcacgtgtcggccgcgccagagttgagccgctgagcagcgcctgtgataagaagacagaggtggttagagagggcgcggcaggtgcgcgcgcgcgcgcgggcggaaggcgcagctcgggtcacgcactgatcgagccgccggccgagatcgtgcagaactcgtacacgccctcaaaggcagggcagtcgtcgccgacaaggactgcgagaggggtggagaaagagggtcagctcgagcggcgaagatcgccaggcgtaacgggaaggtcccacatcgcgacccgcttccggtgagctcctcgaccgtctcgggcgtcacgcgctgaagaaactcgatgtactcgtccgtctgcaggcgcagcagaatgtcagcatcagtcgctgtcaggacaagcactcagtcagaagacgaacgtgaaagcgcgtgagctgctcgtgggtcgaccgtgtaggtctctagggagagaaatgaggtcaggtcggtaaggtggtcagcagccggttgcgacacaagatgttgacacccgattcacttacgaagacgtccatgtcctcgagcacaccgtagttggtgaggaggttgtgcgtcatgcgcatccgatgcggcttcatcgggtgcccgagcccatagttgaagttgccgacgtcgtctgctcgtggcggagcgaggaggcgcagaagacggtcccggcggcgacaaggaataacgcgtcagctcgagccagcaatgtcagccagtcgaggcgccagaacgagtcatcgccaggctcgcgccggagaaagctgcagaacgaccgagtcgcaactcgaaatgaagggtgttcttctaggacgagccgcgtgtccggagctgtaccttgcagctccgagctcgacctccgcccacacaacccccttgaccagctctcgcatccctgatcgggcgaggcccaaaccacgaccatcagacgcaggcaagtcaggaacatacgcacggtcgtagtagctggacaggcgagcgaggacagaaattcagcgaggcgcgtcagccggggaggccatgctctcgggcgagggcagatctctgaagccagctagctctgcgaaagggaggggacgcactaggcgaccttcttgctgttggcccgcgggttgtcgaccgcctcggccggattcttgttgagctctgcaatctggtcgatgccgttctccatcttgtgggagcgagcgaatggcttctggcgttgagaaagggcgacgtgcaggtggtctaggcgttcgaggcgcaggcagccagcggccggctcgccccggcgcgaggctttcgtatttttccctcctgcacgcactcgtcaagtgcggctcgccctgtcgaccataggttcagttgcacgaggccgcatacgggagagcagacaggataggtcgatgctgtcgccgaggcttgacagatgagctcatctcgacggggctggaaacgaggcctggccgcaagctcgcgtgcgtcggcaggaatgcgtgcgatagcggcatgagtgcgcagaggatggctcaagaggaagggcgttaaggagcgtgcgagtcggaccagattgctacagcggtcaaaggtggggcttaggcggggtgcgacgtctcctcacgggtggctgaagaggtactcgacggcggcggacctgcgtcagggacggagagtgcagtcgcagggtcagcttcttgttgaccatggcgcccaaccaactgaacgtacacgttgccgccggcgatctggagcgcctcgaggttcttctgcccgtcgtagaagctggttgaaggcgaagcgcatccggtcagcgagcgaactcacgcgcgcgcgaagccctggtgcaggcagaatagacctggacgcaccccatgccctggagctgagcgagctggtccgcatagcgctcgtgcgctggccgtgcgtcggccggaggagcaggcggtccgccgaagccgccaaagccgccggcgccggcgccgcccatcatcgcctgcatctgcgccatctgctctggcgtcggcatcggcatgttgccaaagaggccgccgccgggtgcgccgccagcagcagcaccgccgccgccgccgccgccgccaaacatgtcgaaggggttgcccgctgccggggcagcggcagcggctccagcgtcacctgcaggaggggcagctccaaaggccccaggctgccaaacgttaggaggacggtcagcgctcggaggtgcttgcgtcctgaaaggtcagaaaagcggggaccgacaggagggaaggcggcctgcccgccggcgccgcccatcatgccgcgcatggcagccatctggcgcatcgactccgggttggtcaggaagttgcggaactgctccgactgcatcatctgccggatttgggggcccatcgccgacagctgagggttcgacgcaatgatctgctcggatgcgcgaggcggaacagagagcgcacgcgcgtacgtcaggttcgggcttcgggcatcagacgacgggcgacgcgtcgcaggcgcgaaagccagcacgcacctggtcgagcacctcagggttctgaagcatcgacgccatctgctgctgaaactggggcgtgttcatcatgccggtcattgcgttggggtcggcgaggttgccgaggcccatgtcggcgaacgggttgctgcggatcaagcgtaagaggcccgtcagctcgacacgctgcaagtcaggtcggcaggcgaagacggacaaggttccaccgcccatgccgtggccctggacgccctcgagcgcggcgagcgggtcccgaccttggccggcagccatcgtcggaattcgttgctgcgaggccgacgctgcgccaaaggctgaggcggccgacgacgacgagcccgacgcatcccccgtctttggcgcgccctgagcgtgttacagcagcagtccattagtgtgcgttcgtttgtagggagggatgcgatggggcggtatagactgaccttgaccatgtggacggtgtggccggcctggagcttgtacgtggcgagcgtctcctcgtccttgaggaccttgcctgtagtttcaccagagcaagaagactatcagcgatcaagtctcgcaccagcaaccagctcctgtgccaggccatgaggcgggcagcggccctcgcaaggcggtcaagcgaacccggcggggatcaatcgcgagaggctgcgtggaggtcgaggacgcacccgagtagatcagccgctggcgttccttctcgacgtcgctcttggccgcgatcgcctccttaagctcgagcacagtcttgtcggtcgcgatctcgatgtcgagcttgagctccgaggggcccttgactgcagccggtcgagagttgggacaagggtacccgcagctccgggtcagctcggttggatcgaggcgggacgggttcaagcagcgaggcagctgccagctccaagccaggacgcactgtgcagggtgatggagtccgacatgacgaggagtaggtatctgctgtgctgtaggtaggggggttgcagagggcgagatgctggttcaaggccgtctcgtcatctcgccgcctctcctcgtcctcgttcgtcctcgctcgcgcgcgcgcaaaggcaggcaagccagcaggaattcgatctgccatcctcctcctgcaaccctcgcctgccgacctctcacagctatcccagcccggccctgctcgcctatccggtcggccagcgctccctctcgcgctgcatgttcgcctgcccgtcgtcgtgcccggtcaagccgccgcgcctgctgcagcgccgggcggcttcgaccggccggcaaggtccgtctgcgctcgcccgacctcgtccttggcgacacgcagctgacgccgtccttctttggcttctctgcagcaacaccggcagctgcggtcaacgcctggcgagcaggttcgtccggccaggcctcggcgtcgggtggcgacgacagtcgatctgcgacggcgtcgacgtctcgctcgagccgccagctctcgacctcgagaacgcgctcggagtcgtcaccggctcgacctccaagcagctcacagcaagcctggttcatgcgaccgatcggaccgccaaaagtgccggactcaccttttcttcggaaaggccgcctagccaaagattctcggccgtccttttgtgcgtcgatctgcgcaaggcgctcgggtcctcatcgtgcacacttggatgcgtctggctcaccaagcttctctgaacccttgagcagctgctgccgtcttgcagcctgtgaaaaagacgttgcagaataacgtccactggcgtacgcgggccggccaggcccctttgcccgcaaggctcggctcgctgggcgagccgcaaaacggccttccggaaggctacgtatcgcccgtttgggcgacgaagacggacaaaacgacctcaataccggccaggccaaaacgaccgcccgagagtgctgggccggcccaggatgatgggaggtccaagggtattgggcggtccgaacagggggagccgcccgaggatgaggggcggtccgaggaggttgagcggtccaagggtgcggagctgcccgaggccttcaagctgccttcaacgcctcgccctccaccaccgccaaagccctctgccgtcctgcgcgagcgcaaaccgcgtcacgtcgccgcgccgtcaacgacaccacgaggcccaaacgccccttcagctccggagccgacgcagaagctcatcagggctgaggcggagcggcttctcaaagagagggtcattccccgcctgcgcaagcagtacgaggccgatgttgccgagctctcgtcgagcctcagcaacgagcttctgcgcgacatgcacgcgctcgcggccggccagttgagcgctgcgcgcatgccaaacctcgcgcccaaccaggacccgccggaacttctgcttaacctcgttcgagcgatttcgggcccgcgagatatggccaacgcgatggagatcctgcgcgagtcgcaccagaagggctggcacacccatccagacatggcggtcgccgttgcgggtccgtaggcttgtttccagctacttactggcttcgctgctgatcaactctcgttcttgccgatcgcgacagaatgcttcccgccagacgtcgctatccgtatgctgcgcgacgtcgaccaatacggcgttggcatcccgcccctcgcacgcctgcgcgtcctgcggacgctcctccgcaacctctttgccggcgatgacccgctcggcctcaagccaccgccactcacgtacgaccgcttgagtttcttccggatgctcgcccgcaaccagcatctcgaggaccctttcatgacggccctcatgttcaacgcctttgccaagctcaagggcgctctgcccgagcagcggacgcttgcagacgtcgaaaagtcgctcggcgagatgtcagtcaagtgggccgcctgccctctctcggtcgaagaggctcatgcgaccatcgtcctcgtcgacaacatccgcgaccgattcgaggaggcggccgagcactttgacactctgccgctcctccacgtccaccggcaccgagagcggctcctcgctctctaccagcgttcgctcccgccagatgcagccattcaagaggctcggatgcagaaggaactgttccagctgccgtgggcctcgtcgctcgcgattaaccggctatcgagccggacggtgcggaagacggcgaccgacggcgagaccatgacgtcgcccaagctgcggcgctggctccggccggcgttcaactttcactcggacgaccccgtcattctcatgctggcgctccagctggcttcacgcttgccagacgcggcacgccgcgaggccgagacggcggtcatcctcgagcggctcgacgacgtcgacgttgccaagggcagctggcgactcgctcatgaggacgacgagcggcccggtgcggcacgggcgctcgcacgtcagacgatcgagctcggtctcgcccagctcagtccggtcctcggcgaccgcgtacggctctgggaggagctattgcaatgaccccaacacctcatgcagattgggtcaaacgtgcaggcgaaggagaaaggtgcgagtggctactaggtggctaacgaatggggctgtaagcgagcgtaggtgtcgtgaatgtcgataggagagggaggacgaagatggcgacgaagacctcgaccagcgaggtcctccgtgaatcgacattgtcggccggaagcgccggacgagaaggagctagaagtgctccttggcgaaagagtaggcgacggtctcggtcgtgcaagcgagagcctcacgcttgaccaccttggcgagtgctgccggctggcaaatccgagacaggtctcgcgttagcttctggcgcgccgaatgatagcagagggcgggctgaacgtacgccgcagaagtacacgccaaccttggtccggaggctcgcttcgcgtccaggcaggtagctgcccttctcgatcgcttcagtcaggctggggaaaatctcgtcgaagcgcggccggccgaagagggtgcgcgtgcgcaggagcgtgagggggctgagcgggtgggtataagaggcgtcagcagatcgacttacaacgagggttgcgaggcacgcactcgtactgctggccgaccgagttgagtgaaatgttgtagcagtcgtcctgcgaaagccgctgggtgaggtagatctggtcacgatccactgcatcggtcagctcctgtgccgtcgcagcattgggacggagtgataggtctgacggagatcttgagcagcttggctgtgaaagtcagacgagcgtcagccatctagcgaccagggctggcaggacagagcctgggaccgaccatctccgagcgcctgctccatctcagcaagcagcgtctgaaaccagccaaaggagcccgtgtcgcgctgcccgggcaacgatgttgtcagcgggttccggcactcgatcaacaggtgcagcagggacgacgcacgcaaatccagatgaactcgaccttgcggagcgagccgaggtgccgccgcttctgtaggtacctgtcgacgcgggcaagctcgcccgtcaggaggtgcggtcaacgagcgaaagaggtcagcgactgggcttaccagatgtgccggagaatagacgcgaacggtgtgacgccgatcccgccggcgacgagaacggccacctcagcggaaaatacgtcctcggcaggggctagagaaaggaaatgcggggtcagagctatctcctgcacgccgtcgatggtgacgaacctccgaatgggcctgtgagcaagaggcgtcgttcatcagcaaggcgcgcgaggtctgcgatgaaggacgagcggacacgcaccgtcgacccgcagcgtcggcatgaccttcccaatcgccccgctctcaatcccaataaacccgccccggccggccgcatggccgagcccgtcgacggcgagcgcctcgccgtcgagcgccgtctgcttctcgcgcgccttggctgtcgtcgccgtcaactgggcggcgagggccggcggcgcgccgaggacggcgccgagctgttccgtaaagtcgccgacttggcggatgtggaccgagatgtaggggtcctatgggcgaaggttaagcgtcaggcagggatccggcagaaagagggacgaccatgacgacgcacgtcgggcgcggacgtgatcgtgaactgcgggccgacgtcagcagacaaagtcagtgcatcgctcccgatagcgtcaagcccaggtactgacagggtgccactggaagcggctcacggccggcacctggaggtacagccactggccgctcttgtacgccatgctcggcttggcgaaacggacctccatgacgccggccgggtgaaggagaaccttggttatggccgtcggccggcgcgcgcggatctcgcgcaggacgcgctcggcaaagtagaggaggccggtccagatgatgctgggtgaacgatcgagcgagggagtagggagggctagtcagtcgagtgacgaccgccagcgaattggcaggagtgagacggacaaacgccacgactcgtagccgaggcagtgctcggtcgagtagaacgggaaggtcgaggtccagtcaggctcgaccgagtcgcggacaaagcagcccgtggcatgcgtatactggcgcggggaggcggtcaaggatgcaacgggtcagcatcgaccggaacgccaacggagcctgcaagcgaaaggagcgcacgaggcacatcatgaagacgaaggcgaggtgatgcgtgtacctgaaggaggactttcatcagcgccaggcgcaagaaggggagagagcgtcagcgaccgacgaggacgaaccagaaggcctcgaagcaagtcttccggatcttgcggtgcgccgtcgtgtacatgaggaactgaagacaggaagcgccagagacgagaggtccggtcagcagttgcgatcagctctgaagcgagataaaacgagccaggatgtaccatcagcaggagcatgacgtgccccgtcccgccgccgggctgggcatagtggatctgccacgccgtctgcttccggacctctgccgccggccataagacgtcacaaggtcagcctatctgggagagtcgacgagggtgaaagaagaggagggacggacgggtgcgctcgacgttgatgaagttgacatagtgggccgtcgtatggacgatcgtccagaagactggcgagcggcgagagagggtgtcaggcgggctaggatggcgagacacgaggaacgagttgacagacggacggacgcatagagtaggcgacctggcgatggaacctgcacgtggagcgggagaggttgcgtcagacctcggtcgcctcggtctggtctgcgagagacgcaccagatgttctcgtcggccgggaagagccagctgagctttggccggacgatgcggatcaggttgcggagcactattccatcaggcgaagcctcgtcagtcgaccttggcgcgagacgacaagtgcagcacaatctcctcttgcttcagcccgagcagactgactcgggacaaggatgagcccgccgtcgaacgcgagcacaagcccggccccgcggctcgtccagacgctgaagcggaggccgttgagcgcctcgagccgggcgttcgtctgctgggtgtaccagccccaggcaaagaggaagaggtggaggccgtggaagatggctgggcaggaggagggcgagaggggcgcttagtgcgctggctgagaggggctgaagtgatggccggggagggacggactgttgaaggcaagtcgccggccagagagctcggtttggagccgctcgaggaggcggccgggcatgtcaagggatgggaggggcaggcaaggagatcgacaggcgaggaaggaccggggtcggatcgggccagccgatgggaggagaggagcgggagacggaggagggcaagagcagatgaggtggtggacgacgggaggacgctcacgcctctcgcgccttccctcttgagcgagctgttgggcaggagcgacgcgtcggatgaaggacaaggcaccgctcggtcaggggttgccgtcgcgtcgggagggaaggcaccgtatggcgccggctcgtccgaccgggccgtcaagcggttcttaggcacgactgcatggtcgaagtagagagccaacctgagcgagccgaggtcagcgaggtcaggcgcccttctgtctcgcgatgggtgatggcggaggaggcctcgcggtcagccgtcgtccctccgaggtcatgtctgctgcgcggtgcgctgacgtttgagggctgagacgggcggcttgcatcctccttcctcacccgccactccgcaatccgcaatacctttgcccctatcccgcaggcctatccagctcatccagctccagccagccatgtccttccagccgctcggccggctcgatcccgtctcggacctcggccgcgacgcccaccactcgccggcgacgtgcttcaagcaggcctcattcgtcaacccctggccgtccgacctctcgccgctctggccgaagaatctctccaacgcaacctaccggccgccgcaccacccggacgatgccaagctcgagcacgagctgcctaagggcaagacgatgagcggtgaggagcacccgatccggcgggccgagagctggaaccaaagcgagctcacggacgacggcggcgtccgtgctgtctggctcggccacgcttcgttcctcgtcagcttcccagcaggcagaagcggcagcaggaccaacgtcctgtttgaccccgtctttgaggaccgctgctcgccgactcagggtgcaggacccgtccgcgatcacgccccgccctgcaagatccacgaactgccggtgcgtgcgcgcccgcccgagcgtgccttcctccctctcttcctcgcgctgatcccccccccctttgtccgtccgctcttggccaccagccgatagacctcgttgtcatctcgcacaaccactacgaccacctctcggccgactcgatcgtcgagctcacaaagcatcacccctcgccgcatttcgtcgtcccgcttggcctcggcgcctggttcacagagacgggcgtcccggcctcgcgcgtccaggagatggactggtgggacgagacgctctttctcgccggcgccgctgcctcgtcgacgaagacgcagggcgggctctcgggcgcggtggccgagggcgcgctgaggatcgcgtgcacgccctgtcagcacggcagcggccgggccgggtgggacaagggctcgagcctctgggcgagctggtgcgtcggcctcgtcggcggcggtagcaagcaggccgctggcgacgacggctcgtcggctggttcagacgcggagggcgccgacgttgcaaagcaggaatgggagaacatgcgctacaaggtcttctttgccgggtgcgccttctctctcgcgacgagtctcccttgcgcggtagcgtagcggctgacgatccccttatctgcgccttagcgacactgcctaccgccagtttgagcgcaaggacagcaagtacacgtgcccggccttcaagggtccgtccttccctccaccctcctcggccaaaaaactcagagctgacgtcctcaacccccctctcgcccccccgcagagatcgcccagaccatctcgcccgcgttcgatctcctgctgctgccgatcgcgcccggctcctcgctcccttacattgcctcgatggtcccttaccctttctcgggcatggcaaagtacctctcggacgaggtcatcaacctcggcgtgctgacgagcaccggccacctcacgcctgggtccgtcgtccggcgtccgttctctccgcccgtcttgcagcccgactgacgctcctcgactcgcgtcttgcagggacgccgccgaaatttttgagattctcggtggaaagggcaagggcaaggacggcggcatgtctggcctcgccgtcggcatccactggggcacgtgagtcgtccaggagccgcttcagtgcgtgagctcgcaacctctcgcccttcgctgacctgccgcctccacaacccccttcgcagctggggtgggcccgcgcttgcctcgctcgctcggcgctggctctggtccgagctccggactaagggcatcccgaaggacggtggccggggagccttcgagctctgggacatcggctactggaagacggtctcggagtagggtagacatggccgcgatcgggttggttctcgcacttttggaactcgcagcttttcgtcttgtacaccatcccttgtatacattcgcacattccagcagactcggaggacaggacagagggagcagcgagactctttcaaacgtggtgcttcttgataaagtcgagcgcgttggacgagctggagcaggcgagattggcgcaaacggcggtcaggcctgacgcacgagacgcggcatagagcaggaggcacgcactcgtccgcgggcttgacgccgatggcggcgtcgatgagcttgccggtgcccttctcgaaaatgaagtgcgagcgcttggtcctgtgtggggagaagttcaatgaaagggttagcccgggaggcgctggctcggctgcttcgtccgccgacacgactcacgaggcgggggcggcaaaggcgccgagctgcttgatgagtacgctcgacgggtcagaaaggagcgagtagctcaggctcttggactcaatccacttggcctgagcggccggcttgtccttgctctgaagaagacagccgtcaaaagcggtcagcctcgtgaaatcctagcgttcggcgcgcgccggaggaagacgcaccaggccgtagatgtcgtagccctgctcgccaaaggccgacttggcgtcacggtacaggcaggcctgggtcgtgcagccgggcgtcgcagccttcgggtagaggaagaagacgacacccttctcgctggctgaggtcagggaaggggggaggcgcggaatcgggagcggtcagctgttgttcgcgcctctcgtagatcttagcctgcctgacagcccgagagactggactacgtaccaagcttcgagacgtcaacatcctcatcccgctcgttcctgagagcgcatcaatgcaatgtcgacggtgggcgcgatgtcggcttgtcagctctggggaaggaagcaacgagcgatgaagagatagacttgagcgtgatggccggcaggatgtcgcccaactcgagcttcttggagcttttggacgcaggcttctcagccgcctcagtctcctcggcagcagccgcaggctcggcgtcgtccttgaccggggcgtcggcctcagcaccagcagcgtccttcgtgtcctcctccgcagcggccggctcgccatccgtcttcggctcatcctccgccttggccttcttggaggtcgcgtcgtccttcttgtcagcgggcgctgcgcgcttgctagcgctccgctggtcgagggaagccgagtgaccgggggaggcgcgtcgagatcggtcagctgtggcgggcctgcgcctggctgcgagctccgggaagctctcgcaccttgacgacaggcggcggctgaggcttgccggcgttgcgcgcggaccggcgaggctcggaagcgttgtcagacatgatgtgatggagctgaagggacggtgagagatggggcagatggggcagatggtagtcaggcgggagcaacgtgccggctcgacgacgcgactgggcgcgtcgtcgcctgctcgccgttcgtactttctcaagcgacaatcgctcaagcggcaggcctctcaagctgacagcaggaatgctcatctgatcctcgacttgccccgcttggcaccgtcggccgagtcagcgcccttgcgtttgccagccttggcccccttgccgtccgcgccgccttcgctgctcgcctgggccttctcgccctcggccgtcagcgccttgagcgtctcggtcaggacattcttctcgcccgcacggacgacggcggcgaggtatcggcggtccgaagtattggcccggagctcctggatgagggcaatgtcctcctgcgaggagagcacgagatcagaggtcagcgctgcgaggagaccctcgatcgtttgtgttgtcatgccgcacctcgagcgtcgtcgggtagtcgctgagccgccgcttgattaggctcttgccgacctcgaccgtctgcaccgtcagcttcggccgaggcagtttgccggccttctgggccttctcgaagccggccttgggcaggcagagcagggtgaggaacgcgctgaatggcggcggaaccgggtcgacaatctggatcgggatgatgctgcggagcgaagggaagacaggtcagcttgacgccaactgccgctgacgggtccgaagcctcactcgtcgccgccctcctgtagccagaactcaacccggtcgtccatcgcccagtccttgaccttgctggcggtgacgacctttgtctcgcggaggtgggccatcgcacactcgaccgcgatgtcgcagcggatctcgacctcgtcctcctcgttgccaacgagcgagggcgggatgacgtcgacgtggccgtatcgccgaaggaggtcggcgttcggcggccgagcgtacgtgttgaactttgggcgcagaatgaaaagccgagtcagacctggccagcaagtaagggaagcgtgtggtcgccaacgtacaatctgctgaccaccgccaaccggctcggtcgtgatcattgtcaggtgcgtttcggtgaagaacagtttagactaggaggggcaggaggcaaagccatcagctcagtgccgtcgtcgaagccttcgcatgtcacgatgaaactcacgttctccgagccccacagggcgtttagcatgtcggccatcggaaccatgccgaccgtgtcgacgtccatgccctcctggccctcaaggtcctcctcgagctcgtcgtcgctgtcttcgcctcccacgccatcgcctgtaccaacgcacagagtgagggcggtcagcggtcgatctgtgagacggcccttgccaagccggacgcaccctcgccgctctcgacatgaaagctgcgcgagaggatacggctaccctgaatgtggaagcgctcgagcgagaagcatcgctcgaagcggtcggccgggaagagctctgggtgggcctggatgacgggcagcagccgctcgttgtactctttctcggcgtcggtcacgccaatcttatctgcgggcgaagggaaggcgggcggacggtcaggacgcgcgagaccgtagggaaggagctgcatcgagacggactaaagattgaggtgcccttgagctcttggacctgctcggccgaccagaacatgggcgtctcaaactcggtcggcatgatgtctgcagacggccgaggtgaacggtcagcctcctttgctacgagactaacggccggcagcgaacggccgacgcaccgaggtagcctcgccacgggctggcagcgccccggccgtcctcaaacatgaggcagaggatgagcctgccccagccgcccttaagggcgtcccactcggcctctgccaggccctccttgagcgcgctcgtctgcgtgctcaggacggccgccttcgggatcgagaagagctcggtgtgggccgggaggtcgacgagcgcgagcaagcccgtgcccatgcctgggacgggcgcgagcgtcacagagtcgttgagcgagatggcggcggaccggcagaagtcgaggaagggcgcataggcgtcggttgcgggctggtcgacgtccatggtcgtgcgaggaggtcggtgttgagcgagcgactgattttggcggagggaagctcagcaggaggcgccggtttgctgcgcggacgagcgacgacagcaggcggccctgttgctcctctgacctcgaccctcgatccagcatgtctgtcgaccaggcgccgcccaagcaggctggagacggaagcaacagccccgaggtcgtcgacgacttcaagccgccggtcgccgtcctcgccctcgccgatcttttgtctggcctgcccgtggcgctcccggccgccgacaatgcgactggtctccgggccgcctttgccctcgtccgacaggctcaggatgccctccgaggtgcgccttctcgacgagcttcaggttgcgcgccgagccactaacggacctcccgcactcggcagagccgacgctgccgctcctgcccaagccgccggcgccgaccgagctcgcgcccctcccgctcggcgagatgatgcgcctgtcgggctcgcaggcccaggcaggctcgcccccgccgccttacacggccgttggtagcaccgacgtcgagatgcgctgaaggcgcccaatcaagaagatctgagctggatggcgccttccgctcggctcgttgtgcgtccaagtgccttcatccgcccagcgtgtgaggcgtcgactcacgcccatctctctctcgccagaccccccagcccctacttcgctccaaggcgaccaagctccacagaatgccttctcgtcgactccgcgacggcgaggaccgcgtccactcgttaagcgtgtgctcgccagtcggcggcctcgcccgtcctttcgggccgacccacccgctatcgtccttcccggtcgagcgccgcgctcttctcgcacgctctagcccgtcgaaggccgccgcaggctctcccggttgtcgcccggtctcgcgcgagagttgcaatatgcatgattcagtgaaggcgagaagctgtacgagcggaggcgggggcggggcgaggcgggagaaagcgatgggacaagcgaagggcggaaacaaaaacgggatgggcaaaaggagagcagcaggagaagcggagcgtaggaagagggttcgagagaaggggcaggaatgcccattgaccaacctacgggggaaaggacgacggggttggagagcggggggaccaaaacagagagtgaagaggggtgccgcaggaagggacgagacagcaggtttacgtggtgcatgaagtggggattgagtgagagaagagtgtttcgaggagcagagcttgaccgggagcgatgggttgtgcaggagggcgacgacggcggccgaaggcggggcggggcaagtgatacaagacaagagcagacggggcagacgttcggaagcgagggagctggcgcgtgttttagggctgcgaggagcagaatatggtcagcgggggggctgagcatcggcgacagagcgtcggatgggggtgacgcaccagtctgctgacgtaggaaagcaaatagtgcagggaaggtgcgaagggagggcatgcagtgaaattctgcaacgagcgggcgcgagtcgtcagcacgagcggatcaagtgaggcccgagaaaaagaggacgcactgctagagatcggcccgcggccaacgaggtgtcgcgctcactcgtcctcgtcgaagcgaccgccgggcccgcgctcggcctggaagcgcgacgccgccggcagctgcgagcggagcatgttgccgccaaacgagccatagccgaacgagcggccagagccggggccggtgccgataccaccgcctccgccgagccggccctggccgagaccctttcctcctcctcctccaccgccgccgaggtccatgccgtcgaggtcggccgcgaggtcgaggaacgtcccgcccgagtgaaccgaggccgacgcagcccgagcgcgcggggcagcaaactgctgctgctgctggaggtagtccgagttgacgacgccgggggctgtcagcgggggcgaaaaggcgccgccgccgaaaaaccgcgagcttgcgtccgacgacatggacgagcccgtgtgcagcggcgggatcgtcggccggtagtctgggtcaaaaggcgacattgggaggccgcccccgccgccggacgggcccgagaacgagacgttgttgcggagcgaggcgttggacgcgtgcgactgggagaagccgccgccgacggcgcgctccgacgtgacgggcgacgaaccgacgcggctcgacgagtaagtcgagctcagaaactgctcgtccgagccggcgctgtgcggctgggccggaaacgggtcggcccgggcgaggtcgtcgttgaagctgcccgaaggggcggcgtacgtgaagcgccgggcgtcaaggccggccgggagccggcggtcgcctgcgatctcgctgttgcgaccgacgggcgagagcgcgggcgagaatggagtgaaggacgagccgccgccgttctggacgccaaaggccggcggcgaaccgttcgagtagctcggcgcacggtcgcgcgtcgagggcgagaggtcggccatggcgtcgtagctaccgaggtccttctgcgacatgggcgccagcatgccgccattgactgtcgggcacgagggaagaggtggtcaacgactggtctcgggcaaagggacaggtacgtgcgaggttgacgcacgaccttggccgccgagcgggttcatctcgcccaagccgttgttgccgccgccgaggccgccgttcgaggcgagcgcaatcaggctctgaagcgcctgcgggttgaggttgctgagcgcgccgaggttgaaggttccgagcccgccaggcagaggcggctgcggcagaccgttcatcccacctgcgccggggccgaagccgcccccgtatccagcgccgggcatgccgctcatcggcatccctccgccgggtccgccctggcctggccggccgtacatgccaccgccaggtgggccgcccatgccgcccggaccgccacggttcatgccggcgccaccgccgggaggaccgccggcgctaccgaggccgccgaggttctggagggcgatgccgagctgcgatatctgggccggattgaggccgttgatgccgccgagcgcgccgaggccaagcccgagctgggccgcctgagccgccgcctgggctgccttgtactggctgcgaccccagctgaggcggatccgacccccgccgatcgggaagccctgcatgcgctcaatcgcccgctcggcgtcctgcttgcggacaaactggacaaagccgcagcccttaccgggcgggatcttggcgtacgtgatctcgccgaacggcgcaaagaacgtcttgagcgtctcctcagagatgaggctgctgagcccgccgacgaagacggtcgtgttgttcgggtcggtcgagttgacgccgccaggaatgccaggcgccggatcatagccctggccgccggcaccaagcggagaaagcggcgagggctcaggccgggcctggccggccagcgccgtgttgacgtgcaggtggctggcgcccaggaactgctcctgtggcgtcgggcctgaggggtatagattgctgctgtgagagaccgcgtcgtactggcccgaccgctgctgctgctgctgttgctggtgaccctgctggctcgatgggtcgtgcaggccgccgctgctgccgccgttgcccggaggagcgtggagagacgacagcgagggtgcgtgacggagaccgtgctgctgctgctgctgcggagactgaggtggtccccggttgccctcgccgccggggaagcgcggcaaactcatgcccggtccgaaagggagtgtgccgccgtttgcagctgcgagctgggtgaggtactcgatcgtgcttggcgacagccggcgctcgggcggcgggatcccgctcggctgctgctgctggttctggccggtcggctgatcgaccgtccctggcgaaggcgacgaccggctcggataggctcctccgcgcgaggcgccgtcgagcgtactgttgaggtgcgagctctcgcttgccgcagacgacggcccgccataaggcgacatccggtcgccgtcctgcccgccgccaccgtagtgtggggttggcgtgccgccgcgcgagctcgcgccgaccgagctcccgccctggctgccgccgaggttgaggcctgaccggttcttggccgtcgcgtgcgagaggcgcatcgggcgcgagaggcagtagacgccttgcatctcgttgagcgcgcgcagctggtcggcctcctcggcgaaactggcgaaaggagagcgagggtcgatcagcgcagcgttcatcgaaaggatcaagggaggcgcacgcaccggacaaagccgtagcctcggctcccgccgccctttgggtcgagcataatttttgcgctccggacgcttgtaaagctcttgcggacaccggcgccggccgtcggcggcgggttcaagaagagccggacgaggtcgccctcggtcacgtctggcgcgaggtcgccgacaaagagtgaaaactcgcgctcgagcgggccctcgctcgccatcgccgggttgacggcgttcgggttcgacgacgtcgtcgacgagctcgcccaattggccttgaacggccgggctgagttgggcatgaagatgggcgggttggcggccgagggcgtaagcgtgtggagaatacgcgaggcgaggtgggccgttgggaaggtgataaaggcgtagttgttggaggtcgggctcgcggcgagtgacatgggcgaggcatggctcggcggcggctggcggacgagcttgatggcgacaatatcccagcccatgagactgcgatgaaggaggccaagagaagaggagttagtctccggacagttccatcgcccttgaaggcaagcgacgcacctgcacatctgtcggaggtacgcctcgtccatccaaccctcgagatcgccaagccagagcgtccgcttctcgccgctctcgcgtcctccgacaccgccgccgcccatgccgatcgtcaagcccggcgcgccagggctcgagatgccgcgctccttgctcgtgccgtcgccggtcgggtagccgccgaggtcgccgacggctgggaagcccggcatcgggacgaacgccgacgccgaccggccggcgtcgtcgttgtcgtccgtcgtcgttgggggcgtctcgaagcgcggtgcgtctgccgtcgacggtcggggcgtcatctccgtcatgtctgagtgagatatcgatggccgctgaccgccgccgtggaaggccgagccgaagccgggggccgacgacgacagcgctgcgccctcgtccggaccaaaaccgaccgtcgacggattgggcggtgtcgacgaagacgggagcgtgtgctgccggatcatctgctcctggtaggacgcctgctgctcctggaggtcgggagccgaccgccccggaggcggcggctggctggccggctcaacacgcgcatcgcctccagccgactcgtcccagggcgacgagtggtgcgagcctccctcggcaggcgacgtgttggcgcgcgagaggcttggaggcgacgccgagccagagtggtcgtgcgtgccgccagaagaggcggccgagccgtgatgcaggagggactcggcactgctggacgagacggaccggccggcgacgggcggcgccggcggaaagggcgagagcgacgacgacgcctgctggtgctgctggtgctgagaggaagacgggcgagagccaggccctccgttggcgctggcggccgagctgcttcctcctccggcggccctcgcgcctcctctcggatccgcgtcgacggcggtggttgactggccgttgagctccatcggtgcgagcctagacgacgagagtggtggattgggcgaagaccgaagcgagctggcgaccgtggtaggcgagggtggagaggatcccgggcgaggcggacgaagagaggtcgagagagattgcgcgggttcggggggtcggccggacgggtctagtgctgactcgcgtaaggggacggcaggtgggttgggaaggcgagcgcgcgtgcgcctcgaagcgaagaagggtcttcgatcgtctgtcggagcgagcgagctagcagaggacgggccgacaggaagatgtggcggtctagggaatggaggagggtcgggaaggaggtggcaggaggcaacgagggcgaggagagatggccgcgcgcgcgacccttgagacgggcgcccgcttcgtcggccggccggcgtcttcctcccagccggcatggcatgtgcttccctccgacgacacctgctcagcttgcagaatttgcacgaaactccagtatgcactcttctcgctcgtcagcccttctcttataagaggaaggccgcggccgcacgccgctggccggtcaacagctctgcccgctaattgcgccgccctgtctggagtccccgcacccgcccccgatccggcagccggccaaagcattgcgcagcccctctaatctcgcaggtcgtgcaggaggaaagagagagagggtcatgatgagacgagggcatgaacgggaaccggacggaaagtcgtgagagaggagaggaacagatggcgcgttggatgaggggtcgggttgggttgaagggcggatcggcctgggctgggccttcttcgcccccccccccgcttcaaaggccgagctgggcctcgagccgctgcatggcctccatgaccgactcggtcgcgacgggcggcgctggcggcggaggcggaggaggcggcggcggcgcgggctcgggcgagggcatgatactcgggtcaatcgggttgccatacgcgtcgagctcggtcggctcgagctcaacgggcgcggcggccggcgctggcggagcagggggaggagcaggtgcgactgcgggtggcggagcggcctcgtacgcgtaggcatcgtcctgggccgtatcgtcgtactgctcgttgacgtcctcgtagctgcttggcgcgagagggccggttagcaagaagcagcctgggtggtggaggggaggccggacgcactcgtacgaggccatctgggcaggcgggatggcgtactgctccgacaggatctggatcaggtcgacgtactacggccgcgcaaggagcagagcaacctttgatcagcacccttagccgtcaaagggatggagaagctagcagcaaagagaccgacgctcatgttggccgaacccgggacgtccttcttgagcttgaggtagcgcttcttaaggatgtggccgggccaattgtgctgagagagcgcaagacggaagcgcaggtcagactcaagccgccgttttgccggctgaggcgtgtcgacgtacccagtcttcgtcgggcaggagccgccactcgatctccgactcttcacgagcgttgagcgagacgatcctgttgaacgcctcagggtcagcactcgaagcaaggccgacaggcagagacagagcagggaggacgcacttgcggacgaggatgaaggcgtcgttcttacaccacttggccttctcgcccgaaacctccttgcgctcgagctgctcctgcctgcacgtcgcacaaacacgcaccggtcagtctcaaacagccgagggcgcgcatctccacgcgcaaacggacgcaccactttgtccgacactgctgccggctccgcttgtagtccatctgcttggagatttcgccccaaaagacgtcgctatccttgtcgtcggccgtcgccatcttgtcacgcgcctcaaggacgagtcgcgttaggagctcctcctcaggcgccttccaggagcctgcgatgggtcgggatggaggggtctcagcggttaggagaagacgagcgcgtcgagaaggtataagacggacccttgagccggccttggttgtgctcgaggtggttgcggtagcggtcgcggcagtcgccggccatccggccgatcgtctgctcgatcttctcccacgctgcaccgtgctcgacgacggccctgagtggagtggagagtagggaacgtgtcagcgatgagggagcgaggccagctcgtctcgtgactcacgccttgagctgctcgtcctgctcctttgtccacgcgccctgcttacccattgggtggtagatgcgccggacgtggtggtagacggcgatgatcggccggccggggattttcatcgctgcgggacggagaggcaaaatcagcggcgtccaaatggcaagcaagagtcctctctggacgcactgatctcggcccagaaggtcgcattgtcctcgcgggccttcttgcccttggcaaagacaatcttgcggagctcctcgtcgtcgagcccgcgcgcattcttgtagccctcgagcgcgtcgtggagctcggcctgctcggtcgtcgaaaacttgccctttttgtaggcgaggccggtcgccttgcagagctccgtcagctgagcggcgttgagccacttctgggcgagcaggtcgtttgggtcgtggccgatcgcccagatcggcagcgggcccgtcggctggtggattggctcctggtaaggcgtctggtcctcggcgtaggcttgggcgtacgggtcgacgtaaggcgccgatggccgggacgctccggcgaacgcaaacggcgtcggtgccgcggatgtcgacgcaggccgaggggcgggggcagcgctcgcctgcgctgggaacgcgctcgcgagagcggccgtcgtcgacgcggtggccatcgcgggcgtgacgaccggagccggcggcggcggcggcgaggccgagctgtccgactttgcggcgtcagcagccgccgaggtcgatgccgtctgcagtcgccggccggccgggatcgtgacggatgccgtggcggcccgtggggggttgcggcggcgcgtcgtcgacgacggcggaggcggattatactcgtacgcgagctccgggggagggacgtaggcgccggccgcaacgggatccggcgccggcgctggggccgagcgcggggccgagcgcgagccggcgggcacggtcagactgacgccgcccgagctgaggccaagggcgctggtcgtcgcaggagcagaaggcgccgagggtccaggtgcagaggtgctggcaatgccaggagcaacggcggtggctaacgatgctggagcggcagcaccctcgccagaggtagtagcgacgggtgcagccgtcgaagcagtcgacgcgaccgggaccgtgcttgccgcaactgcggtagggacgacggccggcgctgccgccgaagggacggcggtggcaggagctggcgcgaccggagcggtgtcgacgtccatcggctcggcactagcggggacagcatcgccaggaacggcgctcgcagcagcaacagcagcagctttggccgcctccttctcctcgcgcttacgccgcttgcgctccttccgccgccgctccttgtccttgtccttgtccttgtccttgtctttgtccttgtcgccgccgtcggccgccttgtccttcgagcgctccttcttgtccttcttcgacgaccgctccttcttgtcctttttgtccttcttctccttctcgggccggtccttcttgctggcggcgccatccttgtccttcggccgcttgtcctttctgctgccgctctcgcgctccttgtccttgtcgcggccttccttgtcgcgcttgcgcttcttcttatcaggttggccgtcgaccggcccaaaagcagcagcagtggaggcagaggtcgatgcgccagcggccgaggtcgaagcttcggcgttggtgttgggtggcgcagagggcgcgtcagtcgaggaggtctcgagcgaacgcttaagcggattcggtggtgcgaccgtcagagccgccgctgcggggacgggagccgattcggacatcgcgctgctgtaggtggcgagagcggtgagaggtgataattgtcagcttggggacaagacgacgaagctgcctgagacggaggatgcgacagggtcagggtggcgggcgggcgggcgacacgcaatgggcacccctgtaaagctcagtcgacacccgcaagcgccagcgcttgccacgaaaggcaagatgctccagggatgaggaacgacatagccgtcgacctcattcgcttgagcacgcgccgcgagattagatctggcaggatgtctggccctgaggctagtcgaggtggaggagcgagcgggacgcgcccgagaccccccttctcgtccaagccgcggccctcccattgaatctggtgtgccatccaacgcgcaggaatctactcacgtgtatctgtcggcttgacgaggttctggaagtgcgccgagtgcgtgctcgagtggcgacgaggcagtcgagggtcgagcgcgcagggaaaggggcgggcttcggtcaggcctgaacgaggaaagacccgtgtgaatgcatcaaagcctgcccatgcgcatcgcaccggtgctcgacctcgacctcgcactcctcctaacagtatctctccacctccttacccctcacagaccgaccgagcaccagcatccgatccagagcgagctatgcctgctgccgtcgtctccgtcaagcctgagtcggtcgactcgaccgtgccctcgcccgtcgccggcccgtcgaccgccacctcgtccgcctcgacacctggcgcccggccctctcgacctgcgcctccgtcctcgcgcctcacctccaaagtgcgcgtcaagccggccgagtcgcccgcacaggccaactactcagactaccggctcgtctcgtctggtctgccgacgggctacgacgccccggacgggacggcccgcttcaacgtcgtcaagttccagtcgaccacggccgaggtcgacccgaggacgtttgcccggccgatcgccatgaaccggcgggatccgcggccgaggccgccgcctgctgcagccgtgctcggcgcggacggcaagccaatcgttgcgcccgaggacgagaagcggattgagcttcggccggtgctcgacggccagggccgggtcgtcaagggtcccgacggcgagccgctgatggcgcccaagcagtcgtacgacgcctcgctcgtcggtggcggcgcggctgcgacgccgctgccgatccgcaagaagaatccgttcaagaagaagacgaagcaggtctacaaggtggacgcggacgtcatccggctccggcgcgaggagcgccatccgtgggtactcgagtcggccgacggcaaggagcgatgggtcggccggatggaggacacggctgagaagcagagctacgtcggctttgtctttgaggacgacaaggatagctttgaggtcgtcgacgtccggcgctggttcaagttccagaagcgggcgacgtacgagacgctcggtgttgacgaggccgaggagctctatgcccgcgttggcaagggcaaggacccgaggcgttggcttatgcacgacgcgacgcggacggcgccctcgggctcggccacaaccgccgcaggagcgaacctctctcgctcgagctcggcaggcgggccaggctcggcgggcagcaacagcggcgcggttcgcggcccgggcggcgtcaagcgcgaggaggccgtcccggcttggctgcgccggtcggtcaaggtcgaggcccttgagaatgcgggcggtctcgcgcttccgagccgaggaggcagcggcggcggcggggtacgtgtcaagcaggagggtggggccggggggatggacgtcgacgacgatgaggagctgcggcgaggaggcggtcgcaggggttccgacggcgtgagtttccgagaagaaaacttgtgagacgctgtgcggggttcgctcatccggctgacgctcgtgctgactcctgttgcagggcggcgccgacggcgagaacgaccaggactttgacgacgagttctctgacgacgacggtctcgtcgagtttgaccagacggacgagcaggagaataaggagctagaggttcgtcgcaaacgcttgacgagcgcgtcgcgtcgtctgccgctgaccgttcgtgctcctccggccgtccctgctccatcaggagaagctcaagcgcgagttccggcagggcaatgctcagggcgaggacgccgtctcggacgacgaggacctctttggcgaggccgaccagctcgacgcctcgggcaaggccatcaagaaggctctccgccgcaaccggcgccggcgggggggcggcgacgacgacgactcggacggcaactcgaacccgtacgcgtcgtccgaggacgagtcgtccgaggaggacgagcctgtgccagaccctgcgagcagccaggcacagacggacgcgaacggccaggcgacgatcctcctcccagacgggacgcgcatcgccgccccgcccgttcgggcgatcgcctcacgccagccaacccagcagcagcaacagcaaccgtcgtcgtcaatggccagtcgccacccttcgcccgggccgccgagcgtcggtgcccagatcctcgctcaacgcgcaacgtcgccgaaccgaccgaatcgctcgcgctcggcctcgcgcgaccgtggccggacatcatccccgggccctgcttcgggagcgccctcgcgcgaggcctctccagctccgggcaacagtgcaagcagcggcgtcaacaagcgcaagtcgacgcccgagctgagcggcgcgtctgccgccgctggcgggggcgaggacaacaagcgggcgcgcgtcgacggccagcagcaacaacagcctcagcagcctcagccggctcagcgcaagctgaacggcccgtccgagcgggttatcgtcgagtacattcgcaagttctcgcccgatatcccgcagctcatcaagcatttcaagcgggtccgtccacttgccggccgtactcgtcttcgaggttctcgatcatgaactgacagcaagcgatcgcccctttttgccttgcagagtctcaagagcccgatcgctgagcaaacggccgccaacaaggcggccctgatcgaaacgacaaagaaggtcgcgacgctcaacggcgtccagattgtcctcaagcccgaatacctcgtctgaagggccccgtgccgttcttctgtgccctgccatgtatcactgcccgccaccagatgagcatgcctaatcatccgcttgaaaaagtcgctacgtgggaagtccttccgatcttctccccttgcgcccgccgtggctgcctgcacggctccggggcacgggcggaaggtcatcttctggtacaagggcgagggtgtcaaggacgtcgtcgaggtcttcgtctggcgacacggggtcgtcaaagagcgaccggcggccgtcaccgaatgctcggctcggagcaagccgaaggtcgcgctggggcttgtcgtcttgcgcggtcgtcgcttgactcgaagcggactgggttgcggaggacaggcgtcaggcggtcagcgtccgtcgacggctgtccgctctgatgatctcgtctcgagactctgatacgtacagactcggtcgaacttgagtcgctcggcgcccccttcctcttgcgctttctcaggttcagtcggaccgcggctcgcgttatctcggcctgagttttgtgatcgcgctggcaaaggcagaagggctgagggtcagcgccatccaccgcgaccggaagcggcaatggagcgcacctcaacagcaagcggtcgtccctgcaggcaggaggaggacaacgaatgtcagcaaaaggagaggattcgccacttcgatgcggggcaagactcaccggacctagcttgaagccgtgaagctccttgatcgcgcgctctgcgagctcctcggccggcctgtggtcgcctccggtggcaaaattgatggtcgcctcacccttgtgcacacccatcttcgtgagccgctgctgcctcggcccccggacaatcttgacgatgggtagcgatgacgtgccgaggttgtctgcgacgaattcttcgatctcagcctcccacatgtcggcaggaaagtggcggatctgcaggccgggccacagtgctcttgtcaatccaggcgtcctgccggcagccacaagcgagcgacgtacgaggacgcgagtggacgacagcggtcgaagcgcccgtgcggccgcttcagcttccctttgctggaccctcttgctcttctctgctttaagcctggcccactcaatttcagcgagagctctccgccttcccaggggcttgttgaccgcctctgagctgggctcgacgacgctcgccggagccgagacggaagaggcgacggacctgggcggcaacgggccgaggtgcgagagggcaaagttcggcgccgcttcgaggccaggcgtctcgaaggcagagctcggcacgagcttggtcgacgagtcgacagccgggtgggccgccgggggatacttcggcggtcgaaccttcagcttctcgagctcataagagagcctcgaggggatgaaggctcggccggcgctctcgcccttctctgacgggatagagtcgctttttaaaggcggatcgtcggggtccgtgaagctgctgtgaggagaagcgagagcctcgggggctttggaccggactcgagggctgctcgacaggagcctgagggagggcgtcgaccgggtgaagggaggggtagcctgccggcaagcgtgtagcagccggcagggcagggccaggttgccactcatttcccgtgctagcgagaggcgattccagtagaggcaccttgctcgggagtgcagatgaggtgcggtagacgagagcggttgcgggaggaggggcggaggatgtgaggtggtcggtgtcggcgtcgagagcagtaacctctcaaaagctcgacccgttggcgttgggccagccggccgacctatagaagaggcccgagtagaccgcctgacagcaaaaaggcagctcgcaggggacctcttgctcggcacgagtctcaggcaggtgctacgggcactgctgccttgcaggtgggccctccgacgtcgcgcttcgcagcagcagcgcgcccgcatcagtccccactgctgacctctcgctcgacggcccggccgtcctcgtcgcttcgttcagtcgtcatcggtatggtacgctctgccggggtgccgataagccccgagccctcttgcatgccctcggcggacacgcagagcctccgctctgtctgctctctcgtcggctcccggcccgcagaccgagggaggacggtcaaggtctattgccagccgccctcgtcgtcgtcgtcggccgggttctcgcagctggactggactgtctagtcctcctggctgcggccccactcgcggaacttcttgagcgacagcggctcgtcgatgagtgggacgggtcccgtgccgtcctgacgggcctcctcgcgcaggcgagtcgccttgcgcatgcgtcggaggaagctgtagagcggacgcaggcagcgcgtcagttgctgacgaggtgcgaggcgggcccacggcgaataggtcagaggaacagggacgcactccttgtactcgcagctgattcgagcgggaaggtcgaaggaggagacgggtcagcgacagtcttcaatctgaggcagcgtgtccttccatgctgagcaacgaagagctctcacatctcgtactcctccctgcgaggcggggacagaagacgcgtggtcgtcagtggcaatgctcctcggagagagagctcgagctgggcgagctcgccgggcccggcaggcaagagggctcacttctcggcgtggcacttccaaggtgcccggttcgtcgcgtgcaggcacttgtagtaggtgacgaggtgccttcgagaagaaagggacagaagagggctcccttgcgtcagctccctgacagacggctttacgaacggagggccgagccagggcgcactttgagcagaggtcgcgccagacgatgggcacgcggtgggccttgaggtcctcgtccgaggcgatggccgggtactcgaccttgtggatgcgagcgtgctcggcgtcttcgggcgagggcgacatgctgagcgggggcgagagggagatggttggcggcgctgacgggcagccgattgggcaaggagaggcggccggcagtcggcgcgggcgggcgtaaccctagcctcaagagacggtcctcctcgccagcccaggagctcacgcccggagcaagggtcgacgtcgcagatgcacggccatggagatcgcactcggggcagctagtcgagcagtgtgccttgcgccagggcaacatgaggaaggagagaaggaagccgctgcgctgcacgaccgccagtagacgagctgtctctgcgcgaccaaccgaccgaccgacgacctgcatcttcgacgctctaccctcttccgagccttcctgtcgcaagcaagacgcgatggccgcccagcacgacaccgatacgcagatgcccgctgccagcgagccgccgtcgggtgacgccgccaacgacgccgaccttgcctctgcgccagccctgcgcgagctcgagctcctccgccagctcgcgctgaagcagcaggagatcaacgacctcgcggtcagcccaacccctttgcatgtcgagacagagcactcgaactgacgatctgtgccgtctgtctgcctcagtcgaccttgacgctgctcacccaaaacccgaatgcccggccgccgcctctgccgctccctcctccctcgccgtccgcagcggcggctgagctcctctccgccgcctcgaccgacgagctcgtcatcccgcgtgcgctcctgccggtcctcgctcatctcagggagcgcggtctcgttttggccgccgagaaccgcgagctgcggcagctctctgctttgccgaccgtcgtcgcccaggatggtagcgctgcttccgacggctcgagtaaaggcgccccagctggtgggaaggcacgccgggtcgacctcgctcgtgtagtcgaccgtctacgggcgctcaccgaagaaaaccgagagctcgggaccgtcattgacgagctaggccgcgaagtcggcgaggggcgggggctcaaggctgcgcttgacggtcagttctaaggctgcctgccgcacgccagccatggttaggtcatttgctgacggcttcttccacctgacgcccgccctgcagaagcacacaagatgattgaggccctcgagtgcgttcggttcttcagtctgctcggctggtcgcggtcgttgacacgcgcgcgtcgcccgctctcgcatcctccctccgcagctccgacctcgaaggctcttttggccagatcgaggccctccgcgccaatctagcggcgtacagggagacctacggcgacttgccggatgctcatcgaccttgagtaagttcttcgcccggtgggtcattggtggacggtcgccgcgcgcgctccgacctcaaacacgtcacgcgcgcgcacacgccatgccgcgagctgctcgtccccctagacggaatgacccgccttctttcggcgcatcaggtgcgtaagtatatctgcggacggcgagcggtcggcgacgactgacccgccggggcttttgacgttgctctagctcgctttgctcgggccgcgaatgagccggagcgatcgacctccggcatccgctcaacttccggagccttgcagtgcttaaaatgaagagagagggtcggctctgccgctctcttttctcccatctcccctcatcccatctcgctgctcaaatatgctgccctcgctcttcgcggttcttctcgccctgcccgcggtcgtcctcggctcgcccctcgcctcgacgggccagctcgcccctcgcaagaacgagggcaacggctggggtcaaggccacggctctggcaagcccgacaagggccagggcatgccggccgacgtcgcctttgtcctcgtcggcgactcgacgaccaacaatggcacgacgcccaactctggcggctggtcgcgcggcttctgcggcagtctcgccgagggcaccttctgctcaaaccgggctgcaaacggccagacgacgggcacgatcgttaccgacggcttctggaccgcagcgatggacgacctcaagggtgaggtcgcaaagggcaagacggtctttgtcacgctccagttcggccacaacgaccagaagattgcgccggcctcgtcgatggcgcagaacctgacactcttcaccgacgagatccggcagaacggcggtcaccccgtcctggtcaccgcccttacccggcgtgggttcagcaacacaaccaacatggtttcggatgcactcgccgactgggctcagggttagttcaaacctcaccccctgtcgctgcaccctcttcactgacggctccgctcttctgcagcaaccatcgacgttgccaacgccaagtcggcgcctctgctcgacctccacaaggcttcgctcgcctacgtcaaccacatcggcaaggacgctgcgcagctgctcaaccgcctgccagaggaccggacgcaccttaacctctctggccagctgctctttgggtgcgcttatttccttgcctccaacgtctcagcggtctcgagctgacgcctcgtcgcacccttctctggcagccggatggtcgctgacctcttccagaccgccgtcgccaactttccgggcgtccctaagttcctctcgcccttcaacgtcgacccgaagctgtcgcttgcgctctatgctggcgagcaatcagtcttcacgcccgtctacccggacaactcgacgacgccgtgctgttacccgggcgcgtgaggggcacaaatggcgcagcgctgccagctcgccttcgatcggatgtacatctctcagtcttggaagcggagcgagagatcgtgcgccggcagtcacctcgttcagtgtacatatgcgagccgtcttcgggccagcgacagccggcttgtgctctggcttgctctgacagtgcggacgacgccgccgtcagtcggcctcttgcgcgcagcgcgcacgaacagtcgatcagcttcaacttctcacctgcactctgccgccctgcccacagccttcgatcgcgtccccagtcctgcgatccagagcttagacctctacctcacggcaagcgaccctaagcctatgatggcgagcctgtgggctcagtggcgggccgcctggtcgcaggtcatcaccgaaccccatttcgacatcccatctcttgccttcccgtccttgccgctctcggccggctcggtttgcaagctcaagcatctcgcttcagctctcctcttctcctcggctgtcgtccagaccgagaagaagcagtggcaacgctggtgcggcaagcactatgaagtcagtcggatccgtgagagaggctcgcgcagctccgtcggccaggtgctcatcgctttgccttgcttgcgtcgagcaggtcggctcgccagtcgatgaacccggccggcgctgggtcgcactcagccgctccgaggtgcccctgctcgacttccgctgcagtatgttctgtgcaagctgacggccatccgctgccagcgagacagtcatcagctgacgttgacagctgctgcggaccctcctgcacccgttcgcatgcctgcttcgccagtcccagccgagcagccctacctcgagggcgagctgggcgcgtcgatcatcgttgacgtctcaacgtcctatcagcatggggagcctctgatcggtttcaaaccgggcgaggagttcgcaggcgacctgctcctgctcgtccgggcaacctcgccgtcgtccggaacctcgccgctgctcaacacgacgattatcgcacctggatcatcaatcgagctcgatctggatctatccgcacttcacacttcaggcgagtcgtatagtattgactgctcagcccagcgtctcgacggcaccgaccagacgttctcgagcgcgagcacgcttcgatacctcgcgcccaacccgttcggcggctcgacagtcaagctcgaccggcggaccggcggtctcctcgtcgacgatagcggacgctgggagcctctgattccgaccggcttctacacggtcttcagcgactttgccgcgacgacccgcctgatcgacgagatagcgcagcgagggtgcgtcgcgagtgccgggcttttgcactcgtcgccctcagcacgcactgacctcgcttcgccatgcacacccagcttcaacacgctgcacattatcccacctggaggccgtgttgcgccctatctggatgtgctacgctacgcagattcgattggcgtgcatccatcacccgagacagactctgcgctgctgtcgctgaccgcgcatccgtctgtctcgcagctctacatcatgctagacctgaggcatgcgtacgcggacgctaagctggtcgaagaagctgccctaacgatgcggtcgttcaagcgcttcctgctctggtacacggccgacgagtgcgtcgatgcaaagtccacttggcaaatgaccgaaagtcactgacaaaccggctccaccaccgcatcgcaggccggacggcacacaggatcctgtcgaggccatcgatgcagcctatgcccagctatatgagcttgacggctaccatcccgtctcgctcgtcctgaattgcggcgactacggctgggctgactatacgagaggcgcagacatcattttgagtgacccgtacgccttcaacgtcgacaacgagctctcgtccgagtatggaacggtgcgtcgaggctctcatgctgcactgtcgaggctctcgcaagggctgaccagtctggtcattgatccggccaggggtgtaacgcgacgtacggtgcgtccccaggcgctctcagattgtgttgcactcgccattgacccattttgatttctcaaacaggctgctgcggctgcgtgagtgctcttagagcgtgcgagcataggccacgagcgctgaccgcacgacgccatttgttgacgttaggacaactgcttcgccggtgacccgtttctcgacgtcacctcgcgcttgaactcgtactcggagcgtcgggccggcctcggccgcgagcgcaacatgacgttctggctcgtgccgcaggcgttccacgagacgttttggtcggcaacgccgacgggggacggtcagtcgcggtcgtgcctgctggtcacgtcggctgccctgacccatcgctctgcttcgctgccctcatcagagttccgcgtcacctccgtcctcggcctcattcacggtgtgaagggtgggtcgagcgtctctcatgcgcatgagtgaggactgatgaaggcaaccttgccctgcaggcatccttccgtggaacgcgccgacgacggccgagatcgcagcaaccttctccgcgctcgcgaagcatctctcgacgacgatcgcgccgctgatcctctcccggtcggcccgccggcttgacctgccatcacaacgaggcgtctacactgcatgctgggcgaactgctcgagcgaggcggccgccctcgtcctgctcgccaatccgtcgcgcacgctgtcggaggctgtctacttgagcattccgctcgacatgatcgccgacgagtcgaggagcgcctttaaggcgatggacgtcttcgagcccgcccggcgcgtcagggtgtcgctgctggacgacggcggactgcagctgtcgggcgagcttgggccgctcgggacaggtgcttggctcgtctggcgcagtatcaagtcgtgagcgagcgctcgatcagcatggcgtcgaccagcgtctgttccgtcaacccggcctcgcccgcccgtccccaacctccgccccaacgcccgcagtttgtcgtcttttcgatggcatgcatagcgtgcgaggcacacacatcggtttgggtcccagaggcgtcgctaccgcgcgccacccccggcccgagcgtgtcgaacgtgaaggaggggaggagaactacgtcggcgtcgaggctttgatttatgccttgacagcgaactctgcaaggaagtgagtgtggtcagcgaggcgagccacagcaacagtggcgaagctcaggcgggacgcactccgggtggggaagtggatgttcttcttgtgctggcgctccgtgacggcgttcttctcgccggcagtcagacggcggcggatagcgcgcgtcttcttgtggcggaggtcaagaggaatgtctgcatgtagcgggcggcgcgcgtcagcggcttgcagtaggctcgcagggagacgagagcgggaaggacgcacacttcgagttcttgtagaactcgcggaggttggcacgctgcttctggttgatgaccgtgaggacccgggcgatcgacttgcggacagtgttgctgaaagcggaggcgagtgcggcggtcagcccagacgctctcgagaaactgcccaggttccagcccgatccgccggcccacccgagcgcatcccagccaccaccgccagaagagagcgcaaaggacgcacatcttggtcagcttagcagccgagccgccagcgaccttctggacgcggagcgacaggagctcctgcttgagctcgccaagctgcttggtcaggtcggccttgttcttggagacgagctcgtgcgcgcgaactttgccggtggaagacatggcgaagactggagacggggcaggagagaggctcgtcagccctcctgctgtacggcctgctgtgtggacgcctgggcacacgagagtcgcagtggggaggaggaagggagggtggtcggcggtcggctgctggcggccgcgggtcgaaagcagcgatggcaggcgagcgaggtcgaggtgctgattcctgggaactggcggcagggcgactgggtgctgggaaagaggcctggcaaggcagcaggttcggcaggacgggccatgggcgagctcgtctgagcgcagccccggcgagcaagcctgcctgctgcggccctgcactgctgctgctccctccgctgcaccctgccacgtcctctgccctgccttccgggaggaaccgcacaggccctacccggtgcgagcctagccttctcctctgtgctgcagcagctcgtctcgactggtgtcggagcctattcaggccgaagcgaggtcggagctggcgccagcccgagttgtgtcgtccgtccgtccgtgacagccaacccgagcgtgtccgattccgagcagaacggataggtaggagaggaacgggtgcgacccctctgtgtgtgccctatcagacggccatacgtactttgctggaggggttcttgacaacggagctggggcggagaggcggcctcgtcaagctctggaggcttcgcccgcgggcggaggagcgaagccgtcgaaatgcatcgctcccgcgaaggagatcattttcgacgatgcattaatgcagtcaaatcctaagccggccctgaactggggtctcgatgatttcgatcaacgctacactggtcccgaacgagtgtgtgactggacctgattaagagtgtacgcgagggggagcatagccggtcaggcatgctacagtctttacagagcagcaaatgggaaatgtacacagctttcccggaagcgtctgtgcctggaccggcgtgcgaggccgcagtgcattgtgcggcggcgacaagtccacttgcgcacttgcgccggcacaccagggttggaaaatcttggatactcgcccgcacctcatcgtccatgtgagctcgcgcgattggacgatagctggctgatttggccatgcgtcatggcgctgggtcacacccatctgcgcagtctcggtctcaaaagtcgccgacgaacgagaggagagcgcatgtgatcgggatacgcatgtgagaaataagtagaatctcgagcgaaaagtgtccaagagagggcgggaaggatgaacggccgcaacgagcgccttctcgccgatggagcggagtctttaggtccagcgacgccgaaaagcgagcggccgaacgtcaaacagcgagcgcatgctggccgtcctagcggcggtcaggaggcggaggccgcggcacgcgttcggctaggttgtaaagagcgtccttgatgcgaagtcgttcgagcaaatcgggggcgagcgcctggcgcgcgaatgcgagcgcgatgtcggaagcgtcaggggacgtctgcgagtggtcgcagagtccctgctggattgcgcagagggtgagaagccggtgcgagggatgtcgaacccggtcgagcctgagaggccgcaagtggacgtgtcagctgttgcgcaacgaacaaccgagatctcgtcccagagcagacgcaccggctggcctcgcccctcgcgcatgtacgagagcgcttctcatcagcgtccgcttccgccgagccgaacgccgccgctgccgctgggcccagtgtagctgcactttgccgtcagctgggcgtggatctccatgtagtccggcggcggcgccggcgttggatcgacggtcgcaaacgtcagccgggtcgacgagccgccgttgacgacggtccggacgacgatccggcggggcgtatatgccggcgggcggtcgggcgtgtagcgcgggaggccggatctgtcgatgtgatcgagggagcgagtgcaagggaggcagggattgggatgagcaagaaagggttggttggggcagagtgagatgggcgacaaggtcagctgctgggagggcgagatggtcgtcggcgggctgagaggcacgcactcgtcctcgtcgacggccggctggggctgcggtgcgtcacgattgctgctgctgctgctgctgctgattgtaccgctgggctgctgcaaggcggcgacggcgcggcgggcgcgaatcttacaggcgaggcagcatggcgccttgtttgtcggctggaagagggccatgcggggcagggctttaggctagtgagggctgtttggtgccggaggagggatggtgtgggtcgaggaggcgactgattagatccggaaggacgaggtcgagtctagtcgagttgtcgaccggcgagagagagttgaggaggtggttgaagaggaaggacgcccttcttcgcctcccctcgttcttaagctcgcgcccctccccacagccagggcgcatcaccaagcaccctggcgtttggtccgatccgagcgcccgcggcgagtcagcgagcgcagccttcgcttccgggcggcgggcgctggggcgagcgagcgggcgaagccgacgggcggatcgatgttccagccggccgggatgggcgagtttatcggcagcagaccggcgagcgcgtccacgaccgacgaccggtcgctcggcgttcgcgggcgaggccaagcgaggcgagggatgcggggacgctcgaaggctgcttgcgttctgggcggagggctgccttgaaggcggaagcgagcgacgccctcgtcggtctgacggcaagcgcagagacacaagcccgacgagtatagtagactgtgagctctgcctgtctggccgtcattggtcagtcgttctggccggcgtctgctgcaagagtctggcggtgggttcggggcgagggcgagagtgggcgtctcggagcgatcggcgggccgtctgcagccgctctggtgagatgcatcgagcacgatgcactactgaaggtcaagcaacgtcggcaatgcggcggcccgacggcggatcagcagttgcagacgcggccatcgccgtaccgtaccttcagcccagccgccgtcgtccctccaacctgcccgacatctcctacacatcttcaacataccccggcactgcccaccatgcgcctgacagtccccctcctccgctcgcgcgcgctcctcgcgagtcccatccagatcacgagcctgatgcaccagacggcgcacgcgtcgcgctgcccgtgccactcctgcacgtcggcctcgccggcccaggcccagcagtcgctcctgacgggcctccgccggatggggagcaacgtcgtcgagaaggagtatgcgtttgaggtgcgtttctggcgtgctccgctgcctgctgcttcctggcagcgatagtagcatcgcgagatggtggtcgcagtgtcaaggtcgggtgagatgctgacggctcgcccgatgccacctcctcgccgcacccaccctaccgcctcgatggatctcgcctactcgcacggcatcaggtcgcagcgagcaacattcgcttcggcgagggcgtcaccaaggaggtcggcatggagtccgtcccctctcccctcttgcgcagcccgactcaccttcgaggtcacgcgggctgctggcagcgcgcggcaacggctgatgctcctcctcgaccgcgtgctttttcctagctttgtcaacctcggtgcgaagcacgtcggcgtcttcacggatccgaccgtcgccaacttgcccgtcatgaaggtcgtgcgtccgcagcacgctcgcagcgccggtccctgatcgggagctcgaagagaccgctgaccgcccctgctgcggatgaactcgaccaggtcgccaagtcactgcgggacaacggcctcgagtttgacatctttgaccaggtcaaggtcgagccgaccgacgactcgtgcgtttgccgtgtgtgactgtagacgactgggagcgcggctgaccgtctcgagtttccttcctccctcagctggcagaaggccattgcctgggcccgtgagaagaacatcacccacttccttgcgtgagcgtctgccgccgacctcttcgcgactcatcggctccagaggctgacatgaggctcatgcgcagcgtcggcggaggatctgtcattgacaccgcgaaggcggccaacctgtacgtatcggcgggccttcgggttgacgccgactttcgctgaccggctcaacccttcagcttcaccgtcgagaaggacgccgacctgttcgactacatcaacgcgccgatcggcaagggcctgcccgtcaagtcgacgcttcggccgctgattgctatcccgacgacggccggcaccggctccgagacgaccggctcggccatcgtcgacattccctcgctccgcttcaagacgggcattgcctcgcgcgcgctcaagccgatgcttggcatcgtcgacagccgaaacactgagacgtgcccgcgaaacgtccacctgagctctgggctcgatacaatgtaccacgcgctcgagagctttaccgcgctgccgtacaacgagcgcgtgccccggccaaagaacccgatcgaccggccagcctaccaggtgcggcatctgtttcgccaaatttgctctgtcctggtcgcagggggtcgtctaatcgagagctctctctctcgcacacgttctacagggccgcaatccgatctccgatgtcttctcgacctgggcgctcaagtcggtcattgagtacttgccccgcgtcctgcgcgacccgaccgacgcgcacgcgcgcgagcagatgcttctcgcatcgacctttgccggcatcgtccgtcccgtcgtctcctctgcctcgtctctcgcgggaccgcaagctgactcaccatacttcgtgcgctcgtagggcttcggcaacgccggcgtccatctctgccacggcgcgtcgtacccgatctcgtcacagaacaagacggggcccaagtactcgcaggccggctacgaggtctcgacgccgctcatcccgcacggcatcgccgtcgccctcactggcccggccgtcttccagttcacggccccttcgagccctgatcgtacgtcccctagccgattcgcgctgcagtgcccttccttcttcagtgcgaagctgacgctcagcgtctctctttccttaggccacctcgagatcctccgcgcgttcggcagcacgtcctcgtccggcctcaatgccgaagacggctcacttggcctcgccgtccgcgaaaagctgatcggcttcctcgacgcgctcggcgaagtcccgcgtgggctctcggccgtcggctacaccgagaaggacgtcggctcgctcgtcgagggcatgctgccgcagaagcgggtcctcagcctcgcgccaaacgtcgccgacctcgagggcgagggccgcgagcagctcgagggcatcatccgctcgagccttaagtggtgagcgcggagacactaagcggagacaaccgaccgatcgaccgagttttaacgagcgagacaacgaaacattgtacatgcatgcacgtgcctgcccagcccggtcagttgcggagggcggagggttgaggattcgacgtagcgaggtagtcgccaggggaaccggccaagtaaaatcgcgtcgcgttcaggtagacgtgcatcggcatcggagggccgacgaccaaggcgagctgccgaccatccgagggactcgccagcccgcggcaccgcttggcgtcctgacgctgtccgcataggttggacgtagcagggcgaccgacgatcgtccggttctgattacgctgatgagggcgcggcggtgtgagtcgctacgaaggcgtcgccgactcgttcggcgagaccggctccacgccgccgtagtacagcctgcagggtgcagccatgatcagcaatggcacccaatcaatctgaccggcgagccgtctggacaacgcaccgactcgcaacgtccttaacggtccagtcgaggccctcgacgaggttctcgccggtgacggccgagcacggttggatcatccaccgatggctcttgatggacgggaggtcgagcgcctgcggcatgtcgcgttgacgggggtcagtgagaatcagaaaggagcagttcctgtccgatgcatgactcacgtctctgatctcggcaaccgacagagctcctgcgacgtcctgcttgttggcgaagatcaggagagtcgcgccggccaagcgctgcatggcgacggagatgatgcccagtcagcaaggcgaggcagtcgttgaaatatctctcgtacgcacctcttcgacgagtaagacgccgagctcgcgtttgcagtcttcgagccggaagcggtcacctgagtcgacgacccagacgactgcgtccgtctgctcaaagtagtttcgccagtagggccgcagcgtgcgctggcctccgacgtcccctgcgagcaggtgagaaagctggcctcagaagagcaacggatcagcatcctaggaacaggcgatactaacagacgttgagggtgtagctgagccgggcgagggtagggttagccatgacggagctcgacgcgtcaaggcacgctcaggacgagctcagctggactgaccctttgtgcatgaaggtccggatttcaaagccgagcgtcgggctgaccgtcttgatgtcctcgccgttcagctgcttgaggatcgtcgttttgccggcgttgtcgagcccgctgcggatgaaggaggggcgaggtcagcaccggcagggagctcgctacggcgccggctggacagacaggaacaatatccgcatctccttctccttgaagcgattcttgcggatgatggtgagcaggcccatcctgtgatgattgagcgagaacaagcagtcgaggtcacggtcggagggacgacatcctcctccccgccggctgaatccgcgcccgtttcgccccgagccgttcgggcccctgacggccaccatcttcgacccgaccctcgtacctctatagcggcttgcccaaaggatggacacgcttgtcgaggacaacatcctcctcctgctctccgactcgaacctgccgctcggtggcttccacttcaggtccgacgccttcctcctccgccaaggctcacttgcgcgcctgcgtaggcctccctcacctgacctacccgacgagctagctagctgacggtctatcttctccatctcctgagcagtgccggtctcgagtcgagcacgaagcacggcttcttgcctgccaacacctcgccggcagggccgtcgcccgtcatcgccttcatggacgcgtctctccggcagcacgcgcggtcgacgctgtcgttcgtcgcccgcgcctacgacctcgctgccgatccgaaaccagactcgctcaaggagatcggcgagctcgatgcgctgtacgagtccatgacaacgaaccacgttacccggcgtggctccaagatccagggcgtcggcatgctgacaatctggcaaaaggcattcaagcggccggcttggctcgctggcgaggagagtgcgctcgagggcgagcggggtgcgctcatggacgcgctacggctcgaggtcagactcggcaagatcgtcgggcatatgccggtcgcttggggagtcctctgtgcctgcctcggcatctcgttcggtgcgtccagccgtctgcgcagcacaagtgcctgacgctggtcgccgctgacttcggtccctcgcgcttctgcctctccagagcgagcactacatcttcatctctacctacatgtccgctcgctcctatcgtcctcggtccgactcaaccagacgggcccgtatcacgctcagctcctgctcctgcactcggcgcccccgctcatcgcggccgagctcactcagtttctgacgccctgcacggactctccggacgacatgtcctcgtcgtccaatgtctcttccgacggccgctctgcggctccactctctgcgttcctcgctggcggaggcttctctgccctgggcgacggccgcggcatcgcccagacgctcgaggagcaggacgcccgcgaccgtgccgagggtgaggcgcaagagcgcgggccggcaacgacctggccggtcggcgagatgctccaggcgaggcacgacgtcatgcacagccgcatgttcaacacctaaggcacgagcgacggatcggtgcgtccctcccttgccaaccaaagcaaggagcagcgattgctgatttggagcgttcttctttgtaacgttgcagtcgtaataacagctcttcaaagcagcccgagccggccccggccatgctcatttcgaccgccacaacacccgcaagtcgtgattggcccccttctccacgccctttggccgaaaccggccttccttcttcatggcgcaagcttgacgacagccatcgcgcatagctggagaagatatcttagccaaggttgaatcgacgctcgcgccatcttccctgcagtgggtcgctgtcgcaacagtgacctccgccccgctcgggcgaggtcatgcagggtgaccgccagctcctccgctcccaagcgaccatgtacaatgtcatgattccctattactcccagagcgtatgtcttctgcgcttcgtctttagctgttgtcgagcgacgagcgacttgcggtacaggtgccgtcccgtgcgtacgctgccgctgcccagagcgagccgcagcgacgtcggccgcgtctggcagcagctcaaccctgaccttcaccttcttcgactcctttccacgcctcccaacttcgtccagcccagcatggagacctacacgcttccctacatgccgaccgagctctcgggcatccacgtccggctcttcaagaacgtcagaaactcggccgccatccgcgcgagcctgatcgcggccgcgagcatggagggcgaggccggcgttcaggagcgcgaccgctacgactattgcttcgtcgaggccaagacggtgagcaagatgccagctcgtactcggggctgctcgaggaccccctgccgcagctgaccctcgagctctcaatggtcgccgccctcgactcatccccaccagatcctgtcccgcagccaccttatgacagccgtgcaccaggcgctgatcgcggccgctcgcggcagcctggcgaccaagacggcccactcggagattctctacaccctgaatccgtcgaacaatgtgcgttcacggagcggagctcgctacatctctgcacaatgctccgggcgcagaagggctgggctgacgcctgcccttgccgctgcacttactcggagatcaccgactcgctccgcaacttcggcgtctcggccaagacgacgtcacttcttctcgtccgcttcggtccagcagagggcggcccgaaggacgaaaagctctcgcaagtgatggccagccttgtcgagggcgagccggcaagcctggacgagctcggcgaaggcacggccgactttggcgcgatccgtaaggtgcggcttgctcctctctaacctagtccttcatgatgtctgagcagccgctgacgctgggtagtccttccctctctgctgcagctctacaagctcacggtccaggaggcggctgaccggcgacgaatggaggacatcatcgtcagcacagtcgcgatgaagtcggtcgcctagatgcgaatggcctcttgcgcaagctgtctctcgcttgtacgattcgcaagacaaggaaagtttgaaatctaggagagcccatcatatcagagcgggccctctagtcgaagcgctgcttcttgccctcgaaagcagcagcaccgccggtacgagcgccgccacggggcgcaccccgaccgcgaccgccacggtcaccgccacgtcctccaccacgtcctccgccccggccgccaccgcggtccgagaagccaccgcggcctccgccacggcctccaccgcgaccgccgtcaaagccgccgcgacctccaccccggccgccacgtccgccgccacggccaccaccctcgcccttcgggggcgcatagtcaatccggcacttgcggccctcaatctccttgccgttaagcgcgccgagcgcggccgtcgcgttcgagagatcctcaaactcgacgtaggcgaaacccttggggttgccggtgtcaaagtcggtcgggagccggatgttggcgacctggccgtgctcgccaaagtactcgtagagcgaatcctcggtcgccgagaacggcaggttgccgatccagagcgtcgtcgagggctcgctaatcttgtcgccgaacgccttggcgcgcgaatcgggcttctcgccccgcggggtcgcataatcgaccttgatctcgcggccctcgacctcgagcggcttcttggcggcgtcgttgaagaccttgacggcctcggcctgatcctcaaactcgacgtagccgataccgcgcgagcggccggtctcacggtctgcaaatgggcgagagggtcagccttgaaatcgcgtcggggccagctgtgagaagtggacgcacccgtcacgaggcgggccgagacgagcttgccgaactgggcgaagtgggtctcgaacgcggcggcgtccatcgaccagggcacgttgccgatccaaagggtcgcgcactcgggcgagttcgagtcgacaatcttgtgcttcttggcagcaggctccgtggtggtctcggccttgcgcttggctgcgaacagaactgcggatcagcatcggagacttcgtttgcagttgagaagctgcagggctcgatacgtactggcaggggcagccgccggcgtgtcctcctcctcgctgacttcctcgtcggaagacccctcctcctcgtcagcggcagccgcgggcgtggcctcttcctcggacgactcgtcggcggaagactcgtcctaaaaatgagaagcaggcggcagatcggcgtcagcgggagcggagggtacagcaacaggcgggcgagccagagacgaaccttcttggcagcgggcttcttgacctgggcggccttcgactcctcctcgtcactcgactcggcctcggaagactcgtcgtcagactcgtcgaccggcaccggcggcggggtcggctgcttcttctggtttgtcgaaagcccgcgagaaatacaacaagccccaaggtcccaaaagtgagcgtgatgctctgtaaagccctcggtaggtgtgtgtagtgcatgcaagcgcgtgcgggtgcttgactgccagcgagggcaggcagagacagaagcagaggcgacgagcagctgcagcgagcacgagtatgaagggagccctcgggagggacagggagctagcgggggacggcactgacaggcgcagccttcttggactccttggtcgccttggcagccttcggcgcagactttttgtcaacctttcccatgatgtgtgtgtaaaaggtggagagtagggtggtgtattgtggtagagacgaggggacggcgcagtggcgaagtgaacgagatggctgcgggccgtcgaaagtttcagtcacgtcgccagggcgaccgtgagcgtcaggggcaagcaggccgtcaaccggcacctgtcagtcttgttcgacacccacccgaacgacagcattataggtgcgcaccctctcagagacctcgctggccgcaacctggatgctggaaggttgatccacttgcgcacttgcctcgccgcagtcagctcctttcagcaaccccgccctgcctcgacccgaccgcctgactgctcgacccctcgctcgctcgtcgttgccactttcctcggaccgcttgtttctctggtgagtgagcctgcagctcttttatcagtcggctttccttcgctgactcaccatttacgcccggtctcagccctgtcacccatgtctgccgtagcatcgtcgtcaactccggccgcggccgcgcctgcgccctcgccggtcatcctcctctttgcccgaggcgtcctctcgctcttccagtcgtggccggtcatgcgctcggccgtactccagtcgtggggtggacccgagtccgatgccaagcggacctggttcgcctcgatggtcgtcgacgagtttgaggagcgctggacgaaggctggctcgccgctctatccggccgtcggacccgacgtcgagcggcagaacattgctccgcctgaagggctcgatctcgacgacctggccgacctgctgtttgacgtcttcctcgaggagtttgatgtcgagcttgaggacggctcgcccgaggagatctcgcgccgggtaattgcctgctggagcgcgagcctccagggcgacgagccggccgtcgtcgcgctcgaggaggaggccgctcggttcagcaagaagcaggccgacgtcgtccggacggcagctggcgaggacgtcggcgacagcagcagcgacgacgacgacgatgacgaggccgctgagggcggcatggacgtcgacccggcaccagcgcggcaggagcgcgttcacgaggagcccgaggtcgacgacgacggcttcacaatggtcaagaagggcaagggcaagaagtgatgggatggagtgggccgacggcacagctgccgatagagatgcctccttcctgtctgcctctcggccccttgtgagccaaggtttcccgctccacgaccctcgcagcagaaatcgaccaggaatcgaccctagcgcgtcctaccagacgcgacattccatcacgagactcatcacccgaccaaagcgagcccgctcgctctcccagtcgacctcgtcgccggcgtcgtcgtcattgccgccgaccttccgcggcggctgcttcagcgcgagaccgacgacgaccggcttgcgtaggctcccgtcgagcgcgagcgcatgccagactacggccgcaatctgactcgtgtacatctcggcgattggctggagggcgggcgacgagggcgtgccgaagagggcgagcagcgtcgtcgacggatgcggcggcgggaggagagcaggcagtggagggagcggcggcgtcgccgacatgggcggcagctggagcgtctcgggcagcgtcgcctggatctatcatagatgtaagcgagagctcttaggccgtcagctcaggtcaaggctttggaccctcagccagcctgcccgtctcgaagctggaaagcacgcacgagctggccgaccttgccgacctgggtgacgatgacgagcacgcggtcctcgaacgcctgggcgacgacctgcgtgtcgacgccatcaatctcaacggtcgtctgacgcgttgagattggcgcctggagcgcggcttgcgagctgctgggttccatgccaaagggagggcgaggaggttgagcaggcgatgggcggccgtccgctcgaagcgggttcgagcgagatcaggggcgggatgaggttgggagctgagctgagaccgttggcgaggacgatctgcttgggcgatctgtctagcttgcgttgatggcaggagaggaaggagatgatgagcgtaaagaggcaagggaggaggtcgctcggctcagcccgacctcgcgtccacgcgccgagagacgtacgtcccgtcgccgaaggcacgtcccgcgctgcagacctcgatctgacgccgacactgtgtggtctgaactgcgaagacagacgtgtggtcgtacaacatgtgccatctgaagagggacaagacaaaagaggaggacgatcctcgtgcttggagaacatgggagaggggacgaaaccgtcgagcggatgagatagaaagagagtgcgagctgctgctcctaatcctcctttgaccccggattctgcacaagccagccgtgggcggccgcccaccgtcggacgtcgcgcatggtcccgcgcgcgtgtgggtcggcgaggagcatccgccggagcaggtgcctgagcgactcgggcacctgcagcggctggtacggcgtcgaggccgggaaaaacatcggcgggccaggcagtggcggccggtcgtcttcgtccgcgtcaacttcgccgtagactggcgacgagccgtggatctgggccggcgggtgaagggtcggcagcgcgaatggtgcaaaggtcggcgaggttgacagcaggtggagcaggtgatcctgcggtggcggcgggacggtcgggggcagcgactcgttgcaggacccatcagagatcgtcaggccgagctcgagtcgacggcgtgtcgcccgctggccggctttgacgccctcgtcggccgtcgaccggcgcgacttccaccatgccttctggctggcggcaagcgcggcatcggctccaccgtcggcggtcgcgcgcttgtcggtccggagacactcccagctgccgggctttcggatgatgggtgccggtgcgagggagacggcgccagcgccggcggtggccggctcacccgtggccatggccgcctcggctttgtcggcacctttgcccggctcgcgcagactccgcccgcgacggaagcccgcgctgccgaggccctcgccaaaggaggctgcccgggtgcgctcctcaaactcccagaacttggcgcccgagacccagaagaccatctcgcgcgtgcccgagacgcctcggaagggttccttgccgccgttgaggacgacatagagcgtgcagccgaggctgaagaggtcggccggatgcgagaccttggtcggcgcctgaaggagctccggtgatgagtatgggagcgtacctgcgccagacaggctgacgtcgaacgttgccaggggcgaatcggcggcgacgaccagcgagttgccaaagtctgtcacccgcggctcgagcgtcgagctgaggaggatgttctgcggtttaatatcgcgatctgacggacgaacaacacgttagcctgcaggccccagctgtgggcagccggtttgagatggtgatctggactcacggacgacacctcgggcctgcagccattcgccgccgcgcgcgaggtccccgacccagcgcacaaatagagcctcgtcgacgagctctggatggctctggacaaactcgtcaagcgtgccaaacggacagtattcgagcaggaggaccgtcgtcggctcggctagggccgtcgaacccaagacatcgttgatgagagtgcctgacgcagccgagaaggcttcgaagggcatcgcggttgagatgctgaccgtccgtctgcgggtcgcgcgtacaatgcccctggccgatagcggactttggacgacgccgatggcgccgacgtagcttatgaccccctggcgggtcttgctccggccggcgccaagccagcgcaagaccttctcctcgcgtgcgagcgcctgctggccctcgacacccgactcctccgatagcaccttggctgcgcagagcgtccagtcgcggcggtccggcgtgcgagtcgaggcaaggtagacggacgacgtcaggcccgtaccgaggaggtaagacggcgcggtcgacaggcgaagcgcagccaacggcggcggcggtgtcattgttgacagtgacgcagtgagctcgagcagctcgagcggagggctcgctggcgacgggcaaggcgaccggaccgacgagctcgaagagaccgatcgcggcggcgggatcgccgactggtagctcgacgttcgtgcgggcaggccgggacggacggccagcgtcgacggctgccggcgaggcggcggcggcggcgtcgtgaccgctcgcggcgagtcgaagaagctcgacgtcttgctcgacgagacggacctgaccgaggcagccgagtgcgtcttgccatgctggggctggaagtcggccggtgcgtatgacgtcggcgacagcggctggagatattgcggcgacgtcggcgagggcgaagccggcggcggctgcaggctgtctgaccgcgccggcaggacatccaacgtctcaacccgccgccgagacggtccgtgaagcgcgagggccgacggcaggagggacggttccgtcagcgagcgctctctgcttggggatggctcactggcggcgacgccggcgagccttggcttgtccggcagggcgctcgccggtgacggcggcgagagcggcgacggcgtcggtgtgaaggtccggctgaagatgtcgttgcgcgagccgccgcccggcatcttgccgacgacaccggcgcctggcgactgctgtatcggtagatgggtcgcaggcgagaaggtgagcgacgtcggcgacggcgtgacgggctgtgacggtgagagaggaggcgagtcgcccgacgacatcgacgacgggtcgaggtctggcagcgagagcacgagcaccatccgcgggcgagaccagaatggctggatcgggaagctgagcaggtgctgaggatgggtttcttgacgacgtggcgagcgggagagggacgaggcgacaggataaggtgagggagagcagctagagaggacgcgcctgagccaacaacgcccgcccggccgagtcgaaagcggctccgcgaaggccgcgcgaggcacacatgctgcagctgccctcgcgttcggccggagccccgaaagcgtcatgtcaggcagcacatctagagggacacggaagatagtacaagagagtaggtcgcaggctgctacaggtctgcgccgtcgagccgtggccggacgttccggccggtgctgccgctctcgaccggcgccgacgagccggtcgcaccaggctcatcctcctcctcgagatcgtcttcgacggccgagccctcgtcctcgtcctcctcttcctcgtcgtcgtcgtcggccgcctgctgagtcttgccctttgcgccctgcttgaccttgcttgaaggtgcccgtttcggcttcgtcggctgggactgcgcacaagtcgaacggcggttgttagcgaaagggctgcctgcagcgaaggcagtattgtgacggaccatcctgtacttggccaggtagactttaagcgtctcggcctgtcgcgacgccgttgagtctatcagccgttgtcagattgtccttcctagagggacgcacatagttgtcgaagccgagcgcagtcagcgcgtcgagcacgtcctcgccgttgagcgtcttgcgcttgccatcgaggcaccgctcgctcgcctcggacgtctggcggagcggagagcaggtcagagtgcgtaagcgaagtgcgatcgcccatctttcccggccaagggactcacgacaaaggagatgaactcggagacacactcctggatgcactccttcgactccttggcgatcttggctgtcggcggcagggcctccttcatgatgcgcgcaacgttggcgatctagaaagacaggcagtcatctttctgtcagcttcaagcccgaccagggcgcagccgatcagggcagaggacgagcaggggacgaaccggcaagtagcggtcctgctcgcggtactcctcgacctgggcgtcggtaaagtcgtgcggctcggccgtcgtcgcaccgcctgcctgcggacgggcaagagcaaccctctggggctgatctgacatggctaaggctgctcaaagggaggaagagtgtgggcgttgagcgcaaagagcagcaggtcgaagctcgttcggggcgaggtcgccgctgctcacgccgagtcggctccgctcgtccgacgagtctgaccagcttgccccggaccaccatctccggcctgatctagccgtactcgtcacttattcgaactccacagccagctcccactcttgatgtcgcaccttcagaaggactttctccgggcgaagcttgggcgtctgcctcagctgccggcgctgcgggacccgttgtcggacgcgtcggcggacgagctctgccaggatgctgaccgggatctactcgacgaggaagaggacgagacggacggtctcggccagctcgggtgagtgctccataacaggaccgcccgtcagctggtgctgatgcaggctcgcctctctgatacagcgcgccggctcgagcacctcgccggacacgaccgtcagcctcgtcaccccggcatccgcccatcgccgctgtacccgactactttgctcgttcctacacgacacagccgtcagagacgcttccggcgttccagacgtactacacggctccttcagatcccaagggcggccgagggacggtcgtcgtctgccaccacggcggcggcgagggcgcccttggcttcgcggcctttgccaaggaggtccgcctactgagtcagggcgaggttggcgtgctcgcttgggactgtcgtggtcatggtgcgtctgacggatgtcctttgcggcgtagctgccggtagtggttgctgaccgtttctcatgaccgtccgcaggcgacacgccgaacccgaccccggacgctctactcgatttgtctctctctacgctcgtgcacgactttgtcgcctgcctgtcagcgcactacccggacccgtcgcagtcgccggatctgctggtaaaccaagtgatggcaaccaggccgagcaagtgcgctgactgacttctgacttcaccccgcacctggttccgcagctagtcggccactccatgggcgcgccacccatcgtccacgcggtaccgaagctcaagatcaagggctttcgtcctatcggcgccgtagtgcttgatgtcgtcgagggtgcgtagtgaggctcgacagatccgacgaaatcgcagaaactgacacgcaacgcctttccgccgcccaggctcggctctagacagcctgtcgctcatgcccgacatcatccgcggtcggccgacaacgttcaaggatgtccaggaggggattgactggcagtgagtcggccgacggctttctcatcgactggtcgcccgagctgatcgcctcgtcgacttgccgtccgcgcagcatctcgacccagacctaccggtcggcgctctctgcccagctttcggtcccgaccctgctagagtcgcgctctgtgtcgacgcttcctcccacgaccgtccatccgtcggccctcgcagcttcggccggcccgccaccaccgatttatccgcctgggtcgtcgtacctgacgtggacgaccgacctcgcccggaccgagcctttctgggagggctggtacaccggcctcagcaaggcgtttctcgtgctcgacgtgccgcgcatgctcgtcctcgccggccaggatcggatggacaaggagctgatgattggtcagatgcaaggtgcgtccccgttcgtgcgacggcacgcacgcaagccggctgaccctcgcgctcgactgcaggcaagtttcagcatgtcgtcctccagcattgcggccaccacatccagcaggacgacccgcgccggctggccgagctcgtcgtcgacttttggcgacgtgcacggggcggcggcgtcgacctgagcaagatccgaaaggtgggccagtagggagcggctgcgcagctcagaaagcgagatcagatgtagctctccttcacagaggtatgcctgctgaacggcaagctagttcagacgcaggaggaacttccgctggccaggcctgcctcgctcaacgagcaagggacaggccgaagcggcagagggaaagcgatcagacggtccccgacgccccgatctcgcccgtcggcccctcgcaagcgagaggcttcggggtctgatccacttcatcgacggctcccagtcgggactgaagccgtatgtcctccgtgaaggggcgcgggtggagcatcatcgtctcgcttgaagttatgtggctagtgtaaactagcaagaccagttatctctctatagaaatgaatcctgcagagctggaggaggcaggaagcaagagggtcaaggtcagtaaggcagctcctaagagcagggcaagagggtctggaggggacgaactgtggtcaatggagagccagcaacaggtgcggccgccggctggcttatgtggccggtcgaaatctgtgtggctgagctgggctgcgcacgaggccgcgcaccgcttcgacctcggtcgcttcacgctgcgcgatgtctcccaggacggagctcgagtggtcaaggtcagcatgagaggatcagccggtcggtcctgtccgaatagaggcagttgcctccttgctgtcgaggggatgtggcgagcgacgagtctgtctggaggcagctgctcgctcgctcggcgctgcatcgtgcagggcgatcgatgatgcgcgcgaggccggcctcgtccgtccctctctcacaccgacgacgttgcaccaacccctgcttcgatcagaactccagccgcgacatgtcgaagcggctcaacaagcgccagcagcggcttgctcaggaggagctcgccgcgccagtcgcaccgcctccggcggcggagcccagcgccgatgctgctccgagtgacgacgacgacgacgagcagcctgccgtcccagcatcaaacagcgtcaatgtctttgctgcagtacgtctgactgaaaaggagaaagggagagagcggaagattgatacgaccggtgtcttgctcatgcctagctcaacgaccgactcccagacgaggagatcgacgacgatgccgaggagagcgagcccgagtcggctccggcggcgaagaagaaggtgcgtcagattgagactattgccgttaaaggtaattggaaggctaatcagctgctcttgcttgtagagctccagaaaaaagaagaagaaatcgaaggcggccgccgcctcttccgacatctcgacgccgcaggctggcggcgcgagtgcgtcatcagcagctggcacgcccgccggcaagcgcaaggcgccgacggcggccgacgacggcatggacgaggtcgaccgggctctagccgagctcaagcttcagttcccggggctcgaggaggagcagcgggcgcgggcgagcacttcgtcgagtggggatgacaagccggtgggcgggcttgcgctcgggctgaggtgtgtgccgagcgtcgccctcgacatcgccagagaggaaggctaactccaagcacgtctatacgcgcgcacaggaatctgcttgccatcgacacgcgcagtctcgatccggacgccgagctccgccgcttctttggctcgaaggtcatcgcgtcgggcccggcagcggccaagcggctgatcaagacacacctgtcgaagccgcgcaacacgtggccgaaagcggcgatgctcggcctcggcatgcgtgagctcacaccggacgaggtcgccgagaagcgcgcgcgcgacggccggaccgagagcgagcgctccgagcgcatgttcacgttcgtccatggcggagagtaccgcgaggcccagcgccagttcctcggcgccatttcgtcgcatggtaggtcttccagacaatcataggcgtcggagtcgtcgctaaccctcgatcgtttgccttcgccagacccgaaccagctgtcggcgctgctgcaggtttacccgtaccataccgacaccgtcctccagagtgcgtcgcctgtgcgctggtctcgagcgggatcgagttgacgagccgaccatttcgctgctcgtctcagtgtccgaggtctaccggcagcagtcagacctcggcgccgcgtcagactttatcgacagggctctttttgcctttgaacgcgccttcgtaccggcattcaacgtctcgctcggaaccgcccggctcgactttggtcgggtggagaatcgtggcttcttcctcgctctcacccgggatctgcagtgtgtcattcgttccccagagcgatgtttcactaagcttgaccctgacgacctgcctccgtaaccagattcctgggccgtcgcggctgctggaacaccagctttcactttgccaagctgttgctgtcgattgacccctactcggatgtacgtctttcagctttctaccgttgcgccctgttgccgctggctgagctacccttcgtgccggctatcagccgcaagccgtgctgctgcacctcgactttctcgcgctcaagtcgggccactcgcagtgggtgcttgacctcacgtgtacgtttgacggcgcgatcgccgagatgggccccgggggcggacgtgtcggcgtccttccgggctggaagtgggctcgcgcgcttgcgatgcgcaacctcgagggtgtcagtcccttcttgctgccgtcatccgttgagctgttgctgactcgcgtctgtcactgtgctgcaggatggagagaagacggacaccgcgctgcgagacgcagtcatcgaggcgccctgggtcgtcccttggctgatggacaaaggtcggtgcccgcctgcgactagtcgctgtcagtctaattagctgaccttgcttccttatccagccggcctcaacctgccggatgcgttccgtacgcacccgctctttgagctcaagatcggctacgagtgcgtgcccaccgaccagctgtcgtccccccgaagctttggctgatcgcagcacattccacgactgacagaggacccgtgtcgacgctacatctgctctcgcacatccacgtcatccgttgcctgccgctttacaaggaggccgccgtcctctcgtggctgtccaagacgatcccgaccttcctcccgctggccgactcggcacccgcacctgaccgcaaggccgcgctcgccttcttcaaggctggcacgcccgaaaacattgtccggcacgttatggtctcggaggacaactcgacgctgctcggcttcctcgagcgcaagtggggccagatgatgggcatgtcgttcgaccccctcccgccggcaaagtcggtttcagcctacgacgtacgttcctttggccgctgcactagcagcttgccctgactgactcctcgactcgtactctgccggcttgacagaacgactacttcatgaacgtcacgcgccggcgaggcggcaaccgctcggccgatcgccacgaggacgagggcgaggacgccggcctgatgcaggccatcatggactcgctcatgggcatgaccggcggtggtgctgccggtggcgatgcgggcagcggcatgatggctggccttgccggtcggctacgtgcgatgctgggcgccggcggcgaaggcgaaggcgcgccggaggtcagtctgcgctcccctttcgtcgcctccggtggaccgtgctgacttctctcctgccctcttctcctcccagatcgatgaggacgagcggcaggcgatgcttgctcagattatggagcttgcggaggagacgcgggcgacgcgcgctggcggtcccttgccgggcggcttcccggccgacgacgacgacgaccagtacgaagatgagagcgactacagcgactgataaggatgctgttttgttagccggcaatgtcgagtctatggagcgcgatgaccggtgttgtcaaggcagcagggcaagtgctgcgagaggagcgacggcgtgaaggctcgcgcgcagtcggccggagcgcgctcagctgctttcgccgccgccttcccttctctcccgacctcatcccgctcgcccctcatgactcaacaagacctgactgcaagcctcagcaccatggacctcgggcggtcccagtcacagccgtctttaggcagcctgctccggccaaagctcagctacgctgaagccgtcacctgctcgtcggccagccgaccgtccgcctcgccgctgccgctctaccggcccgcgccgcctcctgtacatctgggtagcgagaggaagcagaaatcagcgactgactgagacttcaactgtgctgtaagcccggcgctcgaagcctgtgcgtcagatggcagccgagctggaccttagcagctcgcgcgaggacggacccctgtcgagcgactttgcatccccaacctcggcgtcgctccagcctccggtacgttcaaaggatagctcagacttgtcctagcaccggctgacgtcatttgccgtccgtcacaggctcctcacccgctgcgcgtgtcagagctcctcgacaccattctgtcgttcctctcgaccgacgagatcgacccggcccacctccgcatctcgtgctatttctacactcacagacgtccgcgactttacgagatggtccgcgtcgacggctcctgtgagcaacgtcatgtcttcctgcgatcgctggagcgcatgccccaggaggaacgcgacgcgactcgcgtccgccgactcaacctgtccctcactccgaaggacactcgctacggacacaatcctctccaacgccttgccagcctcttcttacgctcaccacctctcgccagtcgactttcgtcgtactcggtgacgatcaagggcgagaaggccgactggatcatgctcctcgagaacgcgcagttcattgccggcatcgtcgttgactgcccgcaactgcgcgcgctcagcctcgaaggaaacgtcaaggagttcttcttcggcgagttcctcaggatcctcctcaagatgggccgactatcgagcagcaaccggtcaatgagaacctctgcctcacggtcccgccggacgcgtttttcttccggggaaaggcctcgcacgcgtcgcccaactcgattcgtctcggctccgtccgcacaattctggcccttccgaagggtccaatcttgtcgttcgctgccgaccttgtggccaacgttgtgcgctctatcgcagaccccaccccaatcgattttatgacggtcgacttcgggtacgtttggcatgcctacctcgagtacagccacgactcggaagtgctcgtagcctctctggctctccggctcctcgaccacgagaatgcagacaaactcagctggcgggcctgcatcccagacgacgaccacgcctttgccatgctcgaggaggaccgcatcttcgggacgctcggcctcatcggcacggtcgcgatgtggacggaagggcgttagcccatcttttgacgaggacgactggtcggagtcggacgatgacgacgacaacagtgactggaccgacgacagcggcagcgaagggtttggcgaggaggacgagagcgacgacgagagcgatgacgaggccgacgacgagatcagcaacaaggcgagcacgagcgacttaccgggcgtcgacaccatcacctcggctgtgaatacgatgctccccgtccatcttgatcctctcagtcgtaagcccgagggtgatcgagcaggtgggggagcggccggcttggcgtacgcatctggatgcggacgcgccgaaacggagccccgcctcgcctcgcctcgtccttcttgctcggcttctgccctccccgaccttcaatcagagactcatgcgccccattagttgatccgaggactcgacagacgcaagacctgctcgccacctcggaacgcgcttcttcgacctagctcagcttgagcggctccgaccgacacccttgcggcccgacctcgagccggctcggccccccgcccgagcgaacctcctctgcctggaccagcttctagcgctcgtgagtttctgatcttgatgatttgtttcggtctttcgctgacgctgctccttggcaccatccggcagagcatgttcggcgaagcggcttctaacgtcgcagtcgacgaggcctctcatgctggctgccggctggtgcgtgcttttgtcgggtcatccgttacttttcgagctgacacgtacgtcgtactatgggctcagaaccctcttcaagtgccagagctattggagctcatcctgtcgttcgtgccggtcgacggcaccttctgcgcctcccttctgcggacgagccccgccttccatgaccactttcggcctcggctctgggccgacatcgacctcaccggcgacgttctccgttggcgcttccccctccttcttgactgccttagtcgcttgagcgcaaacgcctgcgaagccgcgaggccagacatcaggtcgctcgccttcgatattgacgacatgtcgcgcgagcgactcgataccgaccggctgtggctagtcatcggttgggggaaggcaaggtccatcaaggagctctcgatcaacattgtcggcgaggtcgacaacgacgacgttgagctcgacgccgacgccatcgccgaaatcgtcaccgaatacgtgggactcgagcggctcgttctcggcggccacgtctctgaagtcgtcttcgcccgggttcatgccatgctcagcaacgacatgtactacgaccaggacacccgcgacaatcgcctcgcgaagctagagctggagcttccgccggagacgctcctgcttcgcgcggcaaggacggaaactgggccggccctgccttgcttcgggacactgcggacgctatttgtcgctccgagacggcgcaagtacgcccgtcagctctcacacggcctactgagctacatcctccgggtgagcgaaggcgacgggcccttccagcagacgctcgtcctcgggcccgaactcgcagcctacctcgccagcccgctctgcacgagcgacgatcgcaaggagtttgcgctcgcgcagatggtcgcccaagagatcaacctcgccggtcgctttcaggtccactttccggccggccttgacctctcggccgagctcgaggcggatccggtgtaccaggccagaggcatggacgagttgatcctcctgtggtatgaagacgagtggccgattgacctccccgagtccgagctatcagatgcatgagctccgtcttctgcccaatcttgtcgaaagagcgcttctagcgaaggttgcattcgctcagagacgggcgtcgggcagctgagggcgactgcgcgtcgccgacctcgtccgcgtgcaggagctcgttgcaactccttcgccctcttccttgccagtccctcctgcgtcctctccgaaccgacatcttcgacggctggcgagacggctttctggccttcttcggcagctatccatccgtcgccaggcccatcgaagctgacggccttcactagcgacgagccccgcttcgagcagatcgcgagcaggtcgccgcccgaccagccctcctcgtctgcagcccgtcaacgtctaccgcgcggctcaaacgctcggccgcccttgctggcagacattgccgcaccacgagggctgctccgatcctcgtgcatgcggtgacatcctggccgtcaccggtcaaggggaccctctcgacctttcaggaggcagctcgcccctcgaggcgttcggcggccgcctgcccgagccccttaccggccacctcattcccttctccacgggccgctctcgtgggacgaggctcccggcgctgatgaagccaccagcgagcccctctcgacctcccggctggctgagccgacgacgtctggcggctgctgaccttccacaacgcgcctcctcaggggcggggctcgtgcagagcgcgtgcctcccggtcgctggacgagccgcccgccctctgatccgctagagctgcttgctgggtcttcctgtcttcggctctgaagcagaatgccgctggtgtcgctcctccttcgtcacggaggggcggtctgctgacgccggctgaccttcgggttgtctgcagccctgctgccgtcttgacttgggcgtgctcggacgtcgaccagcccatcggcgaaacccaccggccggaacaggcgcgcggattataggggtgctggcgagctgatgccggggacaggagcgtcgcgacccttgcgcctccttcctcctctcccctctcagccctcgcctccctgtcgctagacgcatgcgacatgcggcggagggaccatcacacccggggccaccttgcgctcaaatcgcggcctctctggcgggctataaaggtcagctcgaccttgccttcactcttctctctcatcaccaccttcctcctcctcctccttcctcccctccctccccttccctgcgagatgttgtttcggcctctcgcctctcttcttcttctcgccgcagccgtgcaggccacgctgcctttcggtggagtctgcttgagcgggctcgagcttggaatctccaccaagggcgccgtccgtggcgcctataaggccccggacgtcacccaaagtgagtcgcgacgaccccttctccggctccaagtgcgacctgactcgcttcgctgtcaccctcgcagtttctcactttgtcggcctcggcgccaacctgtgcgtgccttgatgcctctgcagctcgtcgggcttcagttgacactcatgctcggtctcatcagaattcgaattcccgtcgcctggcactacttggtcggcggcaagatcggtggcgagctcgatgccacctactggtgcgtcgcccctccgaccttgctctccgagcgcttggtcgcaggcgctgacgcttcctcgctcgactcgacagtgctctcgtcgactcctacgttcaggctgccctctctgcctcggccgactgcgaagtccttctcgaactcgacaccttcggcggcttcggcggcaaggcacttggtcagggattcgtctcgatcgacgctgttcgtccttttgccagctctcccaccttctgccctttctgaccgcctgcgtcttccctgctgcagtacgccgatctctgggcgaagctctctgcgcgctacgcaggccaggcccgggtttcgttctcgctccgcaactcggtctctggcaatagccgtctctgggcctcggcctgccaggctgccgtcgccaagatccgcgcgtccggctgcgtcagcaacaagattgcgctcggcctcggcggtggcggcctcatccagggcttgctcggcctctggggaagtgccatgcgtgcgttcccttcccttgctatctctaccgctcttgctgacatccgtaatccgctttccagtctcggttaaggacactatcagcctcacggacggcctcgtcttcgacatttcgagcttccttgacggcggcgccctcggcgtctcgggcctttgccttggcagcaactctcttgccgtacgtctgcattctggctgcctgatgagtccctcctagactctctctaacgtctcttccctaatgaccggacagatcggcgcaatgcactcgtggctctccctgcacaagcgtcgtgcctttctgcacaccggcggaggctcgaacgacaactgcgcccgtttcctaggctccggcctggctagtacgtcttgccctttctgccgctctggctgctcggctaatatatgccctctcgtctcctacttcagccctcgaggcccactcgagctcgttccttggcttcacgattgccggcgccggcgccgtttctggcggcctcagcatcgctcctcgtgccagcggcaaggactgctcgctcgtctcgcaagttatcgctcccagattccctcacttgtgcgtttagcgtcgggaacatctgcactctcgacgaccgtcgactgatctgcgctctttcctctaacagtggtgtcggtgtctcggctggcgtcggtgctggcgcatctgcctcagctggcgccggtgcttccctcaatgcctccgtcggcctccctgccgtcagcgcgggcgtcggtgcttcgctcggcgcttcggctgctcttcccgccgcctcggcctcggtctctgctggcactggcgccgctccttccgcttcgggtgccgtcgccgctggtggctcggtctcggccgacctctctacctcggtcagggtcaacctgccctccctcggcggcgtcgtcctgtcgggcctcgagttcggtatcgacgccaagggctcgctcacaggcggattaaccggctactcggcccctgacgtcaagcagattgctcactttgtcagcctcggctcgaacctgattcgcctgcctctcggctggaaatacctcgtcgccggcggtgtctgcggcgccagtgagctcgaggcctcctacctcgccctcatcgacacgtacgtcaaggcctcgcttgccgcctcggccgactgccgcatcctccttgacctcgacacctttggtcacttcggcggcgtcgctgtcggcacgggcgacatcacgatcgacaagctcgcctcggtctacggcctcctggccgccaaatacaagggcgagaagcgcgtcctctttggcatctccaacagctttgccggctctgtcgacgtcgatctctgggccaaggcctgccaggccgccgtcgtctccatccgggccgctggagccgtctcgtcggccatcacgctcggctttggtgcccgggctgagtttgctggcctgctttcaatctggggcgacgctctcctcggcgtcaaggactcgcttaatgctgccggtggcatcgcctttgacttctcgtacgtcccttcgcgacacgctgcgccttctccgcctgtctgacttttcgcgttgctttacccctttggccaggctcttcctcgatgccaagggcgccggcgtctcgtccgagtgctcgctcgacgccaaggcttctgtacgtgctgcgtcgctcgtgcctctctgcaagtcactgctgacctcgtcctttgctcgcaacaggtctcggccatgcactcctggcttggctcgcacggccggcaagccttcatctcgactggcgccggcagcaacgccaagtgcgtcgccagcctccagctcggcttgacagaaatcaagaagagcgcctccattcttggcttctcgatcgccggcggtcagtctcgtcacgttcttgatcatctgtgacgacctctcagcaacttacctgagattcaaaccttctgtagccggctccgtccagagcgactttggcctctccatcgttcccaagggcgaggctgatgtcgacatcgtcagccagtgcatcaagcccttcctgccccagcactggtgaggaacgtttagtcttcgcttgttcactcacccgttctgacgaaccgtcccatctttgcagcgcctgcgaggacactaaggtttcgaagcgccggctggacaccgagccgaccgcccgtcgccgtcaggtccagccacacctggagcggtcccgctcgcactgagtcgcccctccggccttttgcctgctccttcaacctgtctgtggattgattggtacccccttctcccctacctatctccctccctccttcccgcttgctcctttatggactatctgcctctttgtacgactacgaccctcccctccctcggtcactctagcctgacccacccactccctagacctccaccgcgacgcagcacctctcttcaatctgacggacgctcctgcttcacaaagatgctcgttctgtacaagcactgcgctcggagctcagccaacgattgactctgtcagggaacgacgcctgatcagccgttttgcgcggttcaacctcgctggtctgttctggcttcaccactctcgacagtccctcctcgtcatctgcttccctgtcgaggaccgtcccgcccagctgcagcggctgcggggcgctcgctcgacctcccacgacgagatagacgccagttctacccctgccatcgcgcctgcaccggccgcctcgcacgccccgatctcggctgttccctcgcctgctgcagaggacgacgcgcaggccgctccgtcgctcgccagcgcgtctgctcgcgtcggacgcctcgaacctctcggatcctcagctgagaggccaacggtcgttctgcacgccctgaacacgcgcgcttatgctgatctgatgaagaccgagtcaagggctgcaaagacgagcaaagaacactaaggcatacggggagcgagcggggagcaagcataggatgaggctgatagctgtcctccgctcttgtcgtctctcgctttcggcccaagcgtttgacaagcgggcaggtttttgagcagaaaaggagacgcaactctttctttggccatgtcatcggaatcaggtgcaggggaagcaaggagaagcaaggagaagcaagccgagaacaagaaaagacgcgcgaaggtgcgagcctcgattcgccagcggccggcgccagcacgagaaccggcaaaaaaggatgatttaaacagaggggagagaagttggctttatgtgtggaaagagggggcgaggggtcggcgatgccggtggagtcgagcagacgggtattcagagcttccggcgcttctccggccgcttgtcctggccctgctcctggccctgccctatcttggcattctcgggctgccactcaaccgaatgctgtcagggagcctgtcagcttctggagcacacccaaacgactggtatagatatacgcacggacttcttccacttcttctggtcactgattctaccagcaagctgaccatccgaccttgctcttcttgccttcgttcattaggtctctacgtctctgtgaagcccacggtcgtcaacgaggagtagatttcttctcttggaatcttcttgatggcctcttgacccagactctgccagctatcttctctggcgagcggaggggtcttcgacaggtatgatagggggaagcaggcgcgcgcagcaagggtcccagggtgcaagggaggtatcaactgcccgtctgggttgcttgagagggccgagagatctgagcgatcagtcaaccgaataggatgagtctcttcgattctgcctgtgctgagggtcgagggtcggaacgtcgggcttgctccgtcagcagcccgagttgccgcgtgggcccggcgaacgtcgctctccgccgatgggaagcccctcgctcgcttcgaacctcgtgccctccatatctccccaacacccacccgaccagcatcgccagtcatggagaccaactacactgccgcaacaggcccggccctcgacctctcacaccacctctcggagctcgcccggagccggcgcttcagcccgctcaaggtgcgctcacctccctccaccttgcttctcgtcgttctgggctcacccttcacctccgcccgtcttcccatcacaccgctagtcgttctccaagtatatgttcgacccgacggtccgctcgctcgccggtggcctgccaaacccgggcttcttcccgttcgagacgctctcctcgatgacgctctcgccaacgacgtacgccccgggcggcgtcacgcccaaggaggcctcgtggctcgaaaaggtctttggcaagcacctcacccagatcgaggttcccaagtacggcaagacaaagacggagcttcagctgtcgagcgggctccagtacggcggcgcggcgggctttccggcgctgacggcattcctccgcgagtggacgacaacgatcgtcccgccggcctactcgaactgggaggtcctcctctgcgacggctcgaccgacgccttccacaagagtgcgttgccctctggtccgatcttgcaagagagatcttagcgctgactgactgccttcacctgccgactgccctcgtgtgtgtgcgcgcgcagtcgtcgagctcctctgcgagcggggcgacggcatcctctgcgagtcgatgacctacccctcggcgctcgagacgggctggccgatgggcgtccggccggtgcccgtcatgattgacgacctcggcctcgtgccggaggcgctcgaggagacgcttgtcaactgggatccttcggcccacggcgggatgaagcggccgacggtcctctataccatcccgatcggtgagtcagcctgcgctccagctgtaggaagtaagggctgaacctgtccccgtcggctttccaggccagaacccgtgcggctcgaccctcggcgacgaccgccgccaggccatctacaagctcgcctgcaagtttgacgttatcatcgtcgaggacgacccgtaccactcgctcaactttgggccctacggcaccgagtcgcccggcgcccgcgtcgaaaacgacccaactgcgaccgaggaggaccgcaatgccgagtttgtcaagaatgtcggcatttcgtacctcaagagcgacatccagggccgcgtcattcgcatcgacacgttctccaagacggtcagtcgccatttagaacctcgctcccgctccttctcttctgacgacggcttcactgcagatcgcacccggctgccggctcggctggacgacggcaaacccggtgtttaccgagcgcctgctccgcgcgtccgagacgtcaacccagcagccgtctggccccgtccagattctcgtcacgcggctcgtcgtcgagcagtggcagatgggcggctggatccgctggctccgtggcctccgcggcgagtacggccgtcggcgaggtgcgtccggtccaggccttcttcctcctctgcgacgctggctgacgaaacagttgggtgaccgcgctcagactggatgatcgacgagctcgtcaagggcttcaaaattgacctcccgcccgcgtcgtcgtcgctgctcggtccgaccccgcctcggctctcggcgtacctcccactcgaccggccatcgatcgtgggggatgccgcctgggatgagaagcgtgcgctcgtggcgtcgtcatctgtaggctcttccggcaagggccggcgcatcctctcctttgtccctcccactgcgggtgagtcgagctcattgagacgatcgacaactgtctcccccccttcctggctgacgacgtgcttgccgtccctatctaggcatgttttgctgggtgacgatccacctcgacgccctgccgcgcttccggggcaagaagatttcggccgatgacgccaaaaaggtccttcacgagctctggacggccctcgccgacgccaaggtgctcgtcgcccccggctggatgtttgccggcgacggcctccgctctggcgcgcccgacgacgactcgttcgcccctgccgaaatcgagtcgccctttgcccggcttagcggtctcgaggacgaggacgctaacaagattggccacttccgtcttgcgtttgcgacgcttgaggagcggccgatgcgcgaggttcgtctgccccgcttttctgtgttataggccgtgcgctgactttgaccgaacgtttaataatcggagcgcagacgatcaaggactttgctcgcatcgtcaacaagttcttcgcctagaggcgtctccctcatccggcctgtttctcacgacggaccttctcgttagccgctttattgtacccctgtgccatgcgcctcgcgtcatctcgcgctcaaatgaccttcgccccttgactcacgcgtgcacaacgtacagcaacagcatgctcttcagaccgtcggcgtccggtcgacgacctcgcgcagaaccttgatctcctcgagcccggtcccgcagcagccgccgacgacggccttccgtgcccatcggcccgtggcgagcgcgtcctgggcgacctgaacgagtgcttctgcccactcgagcgacgtttccttgcgcggcttggcggcagaaaactcatccctgatacgcagaaataggtgaccgatcagctcgagcgccgtcagcggtgggaagtgggacacgtcgacgcaccagtacgccgcgtcgtcgaggaagcggacgttgtggttcgggtagaggatgagcgtcggcgcccctgacgggagcggagcgtcgggagcaaggtccgggacgagcgacgcaagcgactgggcctcggtgcagttgagagcgacgctaaaagggagcgaaaaggccgtcagcacaaccacccttttagagagtgcgacaaggacgcacccagttggtcggcggaggtcctttccgtcccaaagggccttgcgaccagcagccaagccaccctcgtccgcccaagtcccgctcgggcacgtcagaccgatgtagaacgggatcgtgccgaatacggcgtcctcggcggcgaggtcggtcagcgcctggcggatagccgacacctcagaggcgagcgggaccgtctcgaaggaaacgacgtcgattgaagggacgagggagctgaagatgcgtagccggcgcttgtggaagtcggacaggaaggcaaccgtcttctgctctgccggatacttgcctgggttggagcgagggtgagagcgagcaaatcaggtcagcctcctatcgcgcctcggacctggcgtcgaagcgacttaccgctgaactcctcgccgttgagaagcagggcgccgtaagagccgagcgagagtccgacggcaggggtccgccggccgcttgaggcgaacgactcgctcgcgacccaggtgtcgcgtgcccgaagtgcgagctcgaccgcaagccgcatcttctcctcggcggcggcgcggtcatagccgagcgcaacgaagccttcgacgtcggcctgatacctgtcggaggcgaaggtgtgcgtcaagaatggctctcgaacgaggcttgactcgcgcgcgggaaagggaccgacgttccagtaaggacgaggtcggctcctgactcgaggaaagcgaggtgcgccttgtagataacctcgggatcctcaaatagcagcttcgatgaccagacggccccagagacatcctgctcgaacgtctgaaggcgcgagcgaggaaaagaaggggtcgtgtcagtcgggccggtacggccgacccgcagcaggcgcgcggagacgacgacgacgagcgacgagacttacgtcgcggagcgtcgttcctgtgcgtcaaagagggacagtcagccgtcttggcgcgaggcgaaagatgatcagaccagcgcaccaagacctccgtcgaggacgacctgcggcagaggacggaagggccgttggcgagttagcccctgcgactcgcgtatgcacgaacgcacccagcgacgggcagccaggctgtcagacgcaccagtcggtctccctcctgggcgagtagtgactgcagtgctccggtcatgttctgtcgttgctgccttgctagatgatagttagaagggccgaaagacgtgcgctaacgcccctcgctaacgccatccagggcgtttcggctgccgttgccgcggggtacgagtttaaaggttcccacggcgcgagctcgcgaggatcgacctgtcacccgtctctcctgtccccgtcaacagccatcgccccatcctctctgatgcgccaaatcggcagaggcagcagtacacagcaggccgcgtcttgagctcaaactctctctctgcgatggcggccaacttctggtcgtcgagccactggtgcgtcccggcccgagccctaacccttcagctcgctctcggagctgacgagccttgctttccactcgtcacagcaagcactggctggttgacagagcgacggtcgaccaggctcggtcgcttgacgccaagtatgcgacgccacggcagctggcttgcctgagcatcttctttgccaatcgtacgtggccgctgcgtgcttgggcccatccgcgcctcgcaaccggtgctgaccctccctcttgctcgctcgccagtaatccagcggctcggcaagcggctcctgctccgccagcgaccgattgcgacgtccatcgtctactttcggcgcttctacctgaagaatgccctctgcgagacggatccgtacctcgtgctagcgacgtgcgcatacgtcgccgcaaagctcgaggagacgccggtccacatcaaaagcgtcgtcattgaggctcggcagatgttctctggtgcgtggctgtcgaggggcgggagacggtagtctccggcgtcatcaagctgacgtcgcctcggttgcccgccgcagagctgaagatcccgatcaagcacttccccgccgacaacaccaagctggccgagatggagttttacctgcttgaggacctcgactttcacctccacgtcttccacccgtaccgctcgctgacagcgctctgcgggcgggagccgatggacaccggctggttcccggctccgggcgaggacgagctcgaggaggacgtcaagctcggccgcggcactggcaagggcgccgtccgttttgacaaggagatctttgagacggcctggtacatcgatgctgctcgctttgcaaagcgttcttctgcgacgccgctgacactcttgacggcgcgcaggttcataatcaacgacacctaccggaccgacctcagcctcatgtacccgccgtacctcatcgcgattgcctgcctctacctcgccatcgcacattttcaggcggcacatccaggccgttcactcttgtcggcgacggtccagaagcagctcgctgcagcccaggctgcgcaaggtcaggctcaggcagcagctgccgcagcggcggcgtcaaccctgcccggtgcggcttcgctccctccgatcccagtcacacggccgggcgttccaaagagcctcaaccatccgctgccgatgaacccgctcctccagaaggcgcagcaggcccgactggcgacgccgcctccagtcaccgcaggcttgcccttgccgcccaacccgagcgccccgccgctagctatgaacctgccgccgttgccgccgtcggaccctctggcctatttcgcccacctcaacgtcaacttctcgctcgtcaccgtcatcgtccaagatattctcgcgctttggccgctctgggactcgatggagggcggctcctcgaccgtgcccggcccagcacaaggcccgacatcggccgcgctcaacgcgagcgctgcaaagggcagcaaggcagcctctgctgcgaccaaagacgggctcgcgatggccgacgcgcgcggcgagggctttgtcgacggcagccagatggtcgctcttgttgagacgatgcgcgccgagcgcgaccgcgaccggagctttcccgacggcgcatggccggtccagataggcagggcggccacggcgggtgcccagcagcaatcgtcttcgggtgtcaagcggagcagaggatgatgcgatagtcttctcatcgctcggcgttcgtgaggactagcaaggcagcaaagggtgtcagcgggtcagccgtaagcggttgctcgtgtcggcggcccttgctgctccctccttccgcacaatcttagtcgagcgcgcgcggtttgagggtcaagcaagtcatgggatagagcgaagaattaaagctccacccttactcctccttgacgacggtggacttctcggagacgtagaggccgtcgaggaatttacggatatccttgttcttgacctggagggtggaagaggatgagtgagtcagtggatgcagcaaaaaagagaagaggtgagaagggcacggacgaggcaggcgccgtggatggtggcggccgactgcgagacgttctggacgtcgttgccctcaagaatgatctcgtccttctgcgtcttcgactcagagacggtgacgccctcgagcatcgggatctcacggacgatcttctcgccgaggaagttgcggatcgagagcgacttgccgccgtcgttgatgatgcagttgatggggaagtgcgcatagacggcacgcatcttgtactggaagccctgttggaattcgtgccaaatcaccaaaggggggtccacaaatgggtcgggtccaaagtcgagacgcaagcaaggcaatcaagggggaggggacgagggctcaggtcagacaccgtgcagctttcctaccgagagggagcatgacgccggtgggcggggagcaagcggcgcggccagccaagcccgcgagcgggaaagggggagggccggacgccgcgcactaggagggaaggcggacgaacgacggtgacacccttgatcatgttctcgatgagcgaccggatggtgcggaggcaagcgaggtgcttgcggccaccgtgccagaccgagagggtgatggtgttggcacccttcttctggtgctgagagcgagggaggcaaaaggagcgccaggtaatcagctggctgctcactacgctcaaccgagaggcaagaagacggacaagctggatgtccatgttgacgtggcggacgttcttgacgagcttaccacggggtccctcaacgttgatgatccgggccttgagggcgacggtaacaccagcggggacaacgaactcctcggtcttaagaatgtccttcatctgcagaagtgagcagccaggagagcaagggtcagcggctgcgacctcgagcgcgagcacacggcagacgcatcgaaccgcacgcggcgcagcgaccagcgtcacgccgccaggtacgacccgacagtctgtccctagacatgcgcagaggccctcttgccgcacagtgctagggtctagagcagatgcctgacagccggcagtgcggccggacgaggtgcgccgagagcagggagctcgagctcccggacctggtcgaccgcgctccaacgaaggtcctgcctgacgaggcccgacctcgagccagttggcaagaccaagtccgtcgtgtcctgcgacgagcgtgcatgctgcccaatgcgacctctgggtaggggccgtacctttgagtattgacttgaggtgagagcgttgactgggggagcaaggaaacaggggccgacacagcggcgatttcctcagagtccctgcgcgcgcgcgcgggtggacggacggacctttctgaggttcccgcgcttgacaacggtcggttccaagcgaaagtcggccgagcttccaaccacgacgagccgacaggtcttccctccttcataccatccacctctcattccagcttgagccaagccgccagtctgaccgggactatgaggtgcgctctcctcgaaccttcttcacacacctcacacactcttgcccgaggacgataactccaaacacacgctagggcggggagactctgctctcccagcgatgccctctcctccggtgacccgtcttgggtctgccgggccaggagggggctttctgcgcctcgtccggggagcacaacatacatttatgtcatagttatactgagggctttctttcgatcacattcctacctgttttcgctcgctcgccttgactgccgtcgcgctgcgcagtcgctgactttcgctcttcctccgccccgattcgacctctcaaggtccttgactaacgaccacagacgtcagcagagggggccggacactagaggagaggggcgctgtacgtttgggctgctatagacccggcgtgcctacgagcggctcgtagagcttgcccggcctcgcaaggccactcggtctacaaggttgctctgcgacgagaggcccgccaggccctctagcagctgtcccggtccaacctgcactcgatcttgcggtcgtcggtccgggctctccgttgcgagggcccaccggcgtcatacgatgctagcccgccaggcgtgcacaggatgtttgccccttcctcagcctttcccgatgggcctcgccgaatggacggcattcccgcttttaaacagtcgatcttgatcgccatgtcatcatagcacctttgccttcgcgtcgccgtcccgacggacgctccccattgtcggaggccggtcctcccagccctcggcgccgcttgtcagcccgatccacgcgagcctgagccaggcccagacgagccctaccgcacagtacgtgctgacgaccatgagcgggaggaacgactcggctggggtcgtgtctgccaggtctactttgccggttgtggcaggctggacgtaacgtcgtgcgaggaacggcgcgaggatcgagacgtagacttggacgagagggaagccagccaggtaggccgtctcgagcgcatggacgaccgaggagaggatcgtcgggggcgggctggaagagagaagggaaccggcactcagcatttttgcagacgaggctgacatccagttctcgcttcgtgcgcaccggtagacgcctcgggcgatagccgggaaagcaaacgcgcaccagagcgcagagtagccaatcttgacaggcgtctctgcgatcgtttgaaaggtcaatggcaggcgggcatcagtcgacgttatcaatcgggaagggcgaggtcgtcaaatgcaaggcacgcaccgagcgaggtgaaaaggagcgggaagagggagaagatgccggcgaccgacgctaggacaaacgtccggtagagagcatagctctcggctgcgaggagactggacaaagagcacgtcggttgatcaacaggggagggcggccggtgcggacgcgattaacgtacctcagcggaacgaggaagagcaagacggccttctcgtggacatgccagccgaagaggaaggacgtgtagcccgagatggccagtgcccagacaaaggtcttgtagctcggccggaaccagagcttggccgaaaagacctgcgatgcagggacgcaacctcgggcgtcagtggtgatggcgggcgggacgacgaatgggagcggcgcaggacgtaccacttgcatcgcaatcgtcagcaggaagcagtgcacgggcttgacgttcggcaggacggcaaagatggtgtcgccgacaaaacctcgggtcgagctagcgactccagcctcgtctacgacgaagctgaggccgagcttcgggctgactgccatagcgaggaaactagagtcagcgcaacgcgtcgctcaacgaagggccagaaggccggacgcacacttcagcagagcgcggtctgcaagcgtcacgagtgcccagacgttgcccgcccagtaggcgtggttgagaccgcgcgtgaaggggaagagccgttggccgagctggggcaagtgccggatgaagggtccgaggctggccgcaaagacggcgagcacagtcgcgccaagcttgacgaggttgaccgggaggaaccgtccggatggcgtgaagcagtaggcccggagtaggtacacaaagtagggcggggccatgtagatgtagatgtgcctgcggtcgggtgggacccgggggcaaaacgacgtgttagcgagagagtgtgaggcacgagcagcgagccggacgcacttgaagttgaggaggacagcaaacagagcactgcagagcagcaggttgcgctgagaggccggcaaggcatgcaagtcagctccttgcatcacgcggagacgtaattgagagtgcggcgcacatgcttggcataaaagatgctccagaggaggataccgaacatcgcgccgttgtacctgaaggcagtgcggattcttagcgaggctctgagcagagattatacctgagagaacacactgaaagtggatatggtcaatgatgagccagccgggatgactcccgagcgcggcgacgagagtgaccatcgtagtcaggtcctcggcatgccgcacgaaagccgcaagcgacgagcccaggacgagcgcctcagagacgatgacggacgaccgctggaaggcggtgattgtgggcgagtcgagcggcgtcgccgagagcgtcgtcaagagcgggtcgagccaggacgccgggtacgagagcaggtgctgaaagtgggcgaagaagggaggataatcgctgcagacgaggtatgcgggacggtcagcattgtgttgtgatgtggctctggaccgctgctgggagactcacagagctaggaaggagacgggccgagcacgagcgaaagcgcatcagtcggcggcgagcggagtcttccgggcgaggctgcgcagacgtactccattgcgacgtcgtctgcgagacccccgcgctccttgttagcctcagccagcatgcagattcagagccacttccaacgcacatcatagtaccactggctcatcgggagcgaccgggtgatggcgagccagttgcggtgcacctcgaagtcggtcgaccggctggtcacggcacgcagcagccgagcaggaaggcaaccctggagtcagcaacagcagcagcaaggaggagcaattcgggccagagattacgcactaggcgggaaataagagcagcttgagcgccgtcgacagccagaacaggtccctgaggccagacggcaggcttgtcggccgggctgaagccgcgccggcagtcgacgcgccgaagccgtcgagctcgccttcctccagcacgacgtccgacgggctcgaggatagcctgtaggagccgggcttgtgcgtccgcctgcgggagctcgagctcgtcgctgacatcctaggacgctgatggcttgaagctggtgacaggacggctgggtcgcaggatgtcgtcggagggtgagatggagggcctggcctgcgcctccgagagtgccgctccactctctctcgaccatcacaacgctttcgccgccagcttcgtcctctctctctctttctaaacagacgccgctccctctctatcaacagcgatgggtgtccagcagtcgctcctctcggcgtttcagacggccaagccgcagacgacccgcttcctcaaggtgctcatcgtcgacgagcaggcgacgctcgccctctcgatcccgccgagggggaccgacaaggacgactttgcgctcatcgccgagcagggcgagatatcggacaaccagccggcctactatctctgcctgcttgacggcagcaaaggctggctcttcatcacctatgtgcgtccggcccgtcgtgcctcgtcccttcacgcgcatctcgccctgcgagcagctgatggcggcgagacctctgagcattgctgacgatccttgcctttctccaggtgcccgattgggcgaaagtgcgcgagaagatgctgtactccagttccaaatcgagattgctcaaggcactcggcgaggcctcgttcacagactcgctgcacgcgacggcgccgaccgacctgaccgtccgcggctacgctgtccacctggcggcccaggcagcgccgcacccgctgacggagcgcgagcgggcgcttcaggaggtcaagcaggccgagtacgaggctagcaaggaggacgccttccgcgggacgggcggcggcgtccgcggtggggccgggccgctcagtgccgtcatgggcgttggcgccgggctcgagtggggagagggtgtcgaagatgccctcaaggagatcgcgggcgaatcgagcggagcttcgggcgacaagcgcaaggtcgtcggcctccagatcgacccaaaggtcaatacccggctcaacctcgcgctctcgacgtcggcgacgctcgacgagttgcgcacgcacctcccaaccgaaggcccgcagtacaccattttctcgcacctgccctcgggcgcggtccggccggtcgtcgtcttcatctactcgtgcccgcctaagtcgccgatccggacgcgcatggtctactcgtcgagcgtcagcagcctgatctccaagatcaaggagcgcgcaggcgtcgaggtcgacaagaaggtgcgcatctagctctgacttttctcctcaaacaagcgagagctgaccgtcaccaccccttgcatcgtagattgagacgtccgagccggcctcgctgacgaaggccgagatcctctcggagctggcttccgtcctctcgcgctcatcggccgccgcccagccaggccggtcgtcctcgctgccgacccctgcatctattcagacgagcggccttgcccgcccggtcggtccagcccactcggccagctttggtgcggctgacgccgccgcggctgccaaagcgtcgccgtcgccgacggtcgattcgccctcgggtagtgcggccgatgcttcagctggcccagcaggctttgcgaagccgaagggaccgcctcggcgggcaggtgcgggccgagttgccgctgctcgggcagcttttgagagcggggcgtcgtccccggcgtagagcggaggatcggagaggatttctggggttgctggattgcacgtcacgttttcacgactttgacgcctcgctcaaccagtcgccggatcgcacgccagagcgtcattagatccctctgactggatcgctgcagaaggctataggcgcccgcccccgcttctcgtccaccctcgtcaaccatctgaagtaccgccgctcccttcacttgagaaactcgccgtacgtcgacgtccaggcctccttagcgccggtctcgatgacctccccatggcacgggatgagccgatcgaagtcccaggcggcgacgagcttgctcgcggccgcgaagccactgaaggaagagagaagcgccaggacgacagggtcagccttatccgacgagacttgcgcagggacatcaagaaggacgcacgctaggtcggccttggcgaagcccttgaccatcgtcttgtggaggccggtgccggggccaaacttgccggtgagcatgccgaaaaggccgccggtggcctgctgctcggccgtcatcttcgtgaagaggagatcggcctcgatcagcgtccgcgacggccgatgaaaccacgcgcagtcgaggttggggtgcatggtaactgtcggaaagaacggtgtggcactaggtgagcgactgagagagccttgtgcttcaccggctgccagctaactcacagtaagccgtttcgaattcgctttcgtagccaaactgctcatccggcccagccgcgccgttcgtcttgagctcggcaacattctggaggtgcggcagcttggccttgaggcccttgggcccgacacagagcgcctcggggtactcctttgagtaggccgtcaacgacatcgtgtgctcaatgtcgagcgcgacgagccacttgacggggccgccgagccgggcaatctcatccttcgtcgactgcgtcagtggcgatgaggcggcgatccagaggtcgcccgaggccatcttaatgacggtcgaccggccgccgctggagaagggcagagtaggtcgtcgaatcagcatgtgacgaggcctgcgcacgtctcgccggccgaaagggagacccacataggaacgaggccgaagcgcctgaggaggagagttgcgtcagaaacatctcagcagccattacttgagcagcgtaagactgacttgaagggcacctgagagagaagtcggtcggtcggaggacaggcaggtcagccctgcgaagtgcagcccaggcgatgccgcggcgcacacaccgaaaagattgagatctgcggggtgatcgaccggatgacaggctcaacggacatggttgggatggctggtagagagatgactgaggtcggagaggcgtggagggtcgtgagcgggctgctagtggccgaccggcgcagacgaacggacctttggctcgtgaaaggggtgggtaaggctgcagccagcgcaaaatacaattgtcagcgacggcggctctcgacctcaaaggcagacctatgtgatgtcgagtccctacctgaggatgttgagagaaggtcaacgttagcggctcgaaggctgctgttcctgacggctcgagttcgtcgcatcattcgcctgccctccacacggttgcggccgccggctcggccccggtaagagggctgaccgacccaagatgatcgaacgccgaccgcatcagtcgccgacgaccctcgaccaggcctcggacgacggcctgaccgtctcctgtcgatggcagcaaagaaggccggcgctgttgtagcctagcttccgtctcggaggcgctccgttcgagccgagggaacggccgctacgctttcggcagacggccggcctcgtcgggctgcgctccagctcgccgcttacgggcccgtctctcgctcctaaccccctgccgctcgcacacctgccctgacgcttcgtttgccagccagcccggacgcctgggacctgagagggtctcgcagcccatcgtttgccgttggagcgggacccgttacccagcacctcgaccagcctcgacgttagacgagtcccagcaccccctcgccgcaccgacctcgggcctgataaagctcgacccgagcgtcggtggccagcgacgatgctcaatctccgacgctcagtaaggaactcaggtgcgccgacctctgctcgcttctgacctccccgagtcctccgacgcattgccaaagcaattgagcctgcagggctgacgtcgcttctgagccgtgctcgttggtcgtcgaccgaccatgccggctcgtcgtccgtccgattttccagctcgcccttcttcgacaattcatcgcccatcttcaacccgaatgtccaacgaccgcaacccgcacgacctcctcgctcagtacacgtacgcgacgccggagggagccgcgctatcgtcgtcgccggaccatcagcagcagccggtcggctcctcgcgcgcgcagcagcagccggcagcagccccggccggaccttcgctgctcgcaacggctggcggcagggtcgagcaggccgagctcggctggcggctcgagccatttgaagcgggcttctcggaaggcttcgctgccggccagaggcttgcgcgctcactcgcgctcgggtcgggcatcgacattggcgagccgccggagccgccggtcgactgggcccgcgagttcggtcggtccctcatctccttcgtaggttgatcagcagctaatccagtactgacagacatgactcatccgttccgttcctccagtcgctgcgcagctagccccggccccttacccgcaccctccaacgccgcccgtgccagacgcgaacgcgcacctcaccccgccgacgaccaagtctatcgacacgacctcggcccgtccgccctcccggccactgagctctcgggtaaattcgagtgccagtccgtcgcgctcatccagctcgtgcgcattagcgccgcttaagttgacgccgccatcagcggacgaggagaacgacgatgcgtcagacgacgacgacgcgcgctcggccgcgacgtcggcgagcgggaacgggactggcggggcaagtgtcgctggtgaggagcagcagaaagtcgtgctgcatcacccggacgggaggctcaagacgaaggaggagctgcgcaaggagcggaagcgcttcaccaaccgagcaagtgagtctgtgcccttccactcgctgttttggagatgctctggtgtctgcaggcttgtctcacgtcgcgccttccagtctgcaacctttgcggacacccttgactgaccagattgccattcgtctatctcgtcctatcgcaggcgccaaggtccagcgggcaaagaagaagcaggagctagaattgctccggacagagctcgaggccaagggtgcgtcatccagccaccgtctcttaaagatctttcgctgatcgcttccctcttgacctgtgctttggcctgacagacgccgaggtcgagcggctgcgggcgacggcggagcatctgcgggtggagaacgagcgccttgaagcgagcaccgagccttgagactgtgctctctgaatatgcgttatctcttcattctgcttcctgcgctcgctgtggacacatgagggggccggttgaacaggtgcagggaggaagggctgcgacttacttacggtgccggcggtcggcgcgtctcgcggctggttttgcggagttgcacctccttccctcgcctcaatcgcttcccactttcgcctgtaatgggtcccctttgggaacacacccttcacctttccagcgtaatcatgctggctcgttctccgctcgcgcgggctcgctccctatctccgccagtgccgcatccgcagtcgtcgattattcaatggccttgcgatcggttaaaccgccgcccctcgtcgtttgcgacgagtctttcccgaacaaggtcacttgtcagggagcgcggcgggctggacggcttgatctttaaagggataggcgggctcgtggtagaacctggcagtagcgcaaaggatgtgaaccttttgtcacccttcgcatcagaatcttttgtccctcgcgtgcgctttgagagaccgactcgctctgaggatctgttgcagagcgaagagtgctctcgcgacaagacgcatgttctcggccgacgccttcggacgactgcccgtgccgcggccgaaggccgcaccttcatcgcccgacctcctctttgctcctgaccgtcaccgcacctctctcccatcttcctgccacccgctcgcctagtaaagactgccacccttccgatggcgctcgtcggctgctcgcgctgggccgcgctcggcctgctcgggagcgaagctcgcactctcggcgccaggcgagcggcgagctctactagcctggtccgtctcttgccttggcgacgctgcgtctcgggtggctcggctgctgaccagctctgaccgcgtctggtgacgaacagacggcagcatcgcctgcgccgaagcagtcgactcaatctatcccgagctcgtctacgtgccgccgccctgccagctcgagctcgtcattgccgtacgcagcacgacctccggcggcctctcttccacgagcatggcccggccagcaaggttgttcgccgctctcgacggcttccaggtcgacatcaccactctgggtggaccaactgcgagcgtaccggtcgcactcgccctcaccctcgtcgccgccgtcaccgtcctcggccgaccctcagcccgaaacggcagcgtcggcccgacctcctgcaagcggcactacttcaccttcaccagcaacgccggcgccaacgctctcagactggtcgattatccgcaagctcgtcgtcaacatttggcccaaatcgggctcggccatcaagatccgtgtgaccgcggcaatcgcgctgctcgtcgccggcaaggtgctcaacgtccaggtcccgttctggttcaaggagatcgtcgacggcctcaacatggacgtcaccgaggccggcaccgtctggatggtcgtcggctggagcattctcggctgtacgtcccctctgtcgaatcacctgcgttggccttgtgctgacactcaagcgacgctcctgtctcgttctagacggcgctgcgcgcatcatgtcgaccctgttctccgagctgcgcaatgccctctttgcttcggtcgcgcaaaaggcgatccgcaaggtcgcccgcgagacgtttgagcacctgctctcgatggacctccgcttccacctctcgcggcagaccggcggcctgacgcgggcgatcgaccggggcaccaagtgtgtcgctcccgtcccgacctcggtcatcgctctgcggcacgttctgagtcgaaactgaccgatttgcccgattccctttgcgcttctagaggcatctcctttgtcctcagctcagtcgtcttccatgtcgtaccgactgcgctcgagattgccatggtctgcggcatcctcgttcgtcgtcgactttggcttctcgcttcgcttcgaatcttggcgctgatctctttctcttctctcttgctgccagacctggaactttggctggcactttgctgccgtcaccgcaggcaccatggcgacctactcgtggtttaccatctcgacgaccgcgtggcggacaaagttccggcgcgacgccaaccaggccgacaacaagggcgccacccgggcggttgacgcgctcatcaactttgaggccgtaaaggtccgtagctctctgaatcgctgtcggcgtggcgtgccgccactgacgacgaacatctgccctctcatcgacagcactttggcaacgaaaagtatgaggtggcgcaatatgacaagacgctgaagtcgtacgaggacgcgtccgtcaagattgcgacgtctctcgcctaccttaactcaggccagaacgtcatcttctcgagcgctctgacgattatgatggccctcgcggcccaaggaatcgcggcaggttcgctgctcgcactgcgcacctcaatttttgacgcactcgctgactcttgccccttcctcaggcacgatgacggtcggcgacctcgtcatgatcaaccagctcgtctttcagctgtccctgccgctcaactttctcggcaccgtctatcgcgagcttcgtcagagcctaatcgacatggacgtcttgttcaacattcagggccaggcggtcccgatcaaggtgcgtcggcctgcaccgccggcttctggagacctctgcctttcacacactgacctcgacggctccctccagaacgggccgcacgcaaagccgctgtcgttcaagggcggcgagatcaagttcgagaacgtctcgttcggctaccatcccgagcggccgattttcaaggacatctcgttcacgattcctgccggtaagaaggtggcgattgtcggcacgagcggctcgggtaagagcacgattctccggctcctctaccgcttctacgaggtcgacggcggccggattcttgtcgacggccaggagatccgcgacctaacgctcgagagcctgcgagaggtcatcggcgtcgtcccgcaggacacgccgctgctccatgccgacatcctccacaacgtccgctatggccggctcgacgcgaccgacgaggaggtcaaggcggcctgccgccgggctcatgtcgccgacacgatcgagtcgctcccggaaatgtaccacaccaaagttggcgagcgggggctcatgatctccggcggagagaagcaaaggtaaggctggctttgcgaggcacgcagagacacagttacgccagagactgaccgtcattcatatcgcagactggcggtcgcccgcgtgctcctcaaagacccgccgatccttttctttgacgaggccgtgcgtccgctccctctatatttcgctccatccgaggactgacgtgccttcgtaccctttacccagacgtcggcgctcgactcggaaactgagatgaagcttatgaccgacgtcaactcgatgctcgccgaccagaagcggacgtccgtcttcattgctcaccggctgcggaccatctcgaatgccggtacgaccccgtcactctcactcgcctgtcgtgctgctcactaactgacctctccattcggctctctcagaccacatcattgtcttgcacaagggcgaggtcgtcgaggcgggcacgcacgaggttctgctcgcgcgatcttccgccgagggcgcgatctacaagggcctgtgggagacgcagctatctctcgacgccaactgacatccatgactgtcaagcaggaaggagcaaacgagacggcatgcggacattagatcgtgaaagtccggtgggggggggggaaggtcgtcagaaacgtgtaggggcgaaatgagagagagatcatgacaagactatgtaaagtgagaaggatgagggtccgcgctcagggcggggcgagactgcgcccgagcaaggcgtctcgcttggcttgcgtgctttcgagctcgtcggccgatagcgaggcaaaggacgacgccgaggacgaagcatagtcgctgtcgggcgagacgacaatgtacggcccttggctggatgtcggcgagtcgccctctgaaccgatgctccgctcagagagggagcctcgcgagcgctgaagagacggtggtcacagatcagctttagacgcgacagcgcaagtcatgaagcgggacggacggaaagatgcagcgtacgccgcagcagcgactcgcccttgcggctcgacgtcggagtcgaagatgctggttgttgggcgcccatgccgaaagtgtggaggtcgtcgggcgcactagccgatggcgtccatgacgagggagggtcctgcgggagtcgacaagcctcgatttagatggcgacgataacgcatagacacgaagacaggagctggacgtacggcaagcctggttgaggacgacgaggccgagctcgcgacagaagtagaggatccagagttctgttggtagccgagtgcggcggtcgccttgcggcccgtctttgtgaagatctgactgacgagagatcctttctgcagaatgacggagcgcgagggagggatcagtggggaagttgcactcgacccagcgcggcagcagagacgcacctgactccaagcggccttgagcatctggctcttgagctcgtcggccagatcctgaaagccccacgtcttgttgtggaagacgaagctcggggtcgtgaagcgaaagtcgtgcatgtcggtgaggttcttggcgcgctcgccctgcaaggaaaaggcgtcatcgtcagcggcagcgtcaacagcctgcgaagctgcacccggcaggacgcaccttgtagctcatgacaaaggtcgagctctcgacctcgatgtagacaaacgtccggttatggctcgcccgagagcgcatctcctcggcctggctcttttcgacctgctccttgaggctgaggctcgacctcgagtgcttaatgcgcggcgtcgcatgaccagctgcgacgtcgaccttggtgatgctggtcgagctgctgacccgggtcaacgggcgcagcgaagacccggccgccgacaggttctgcgacgacgacgaccgcttgggtggagcagacgcccacagggcatcttcagcggtcgggtcggaacgggccgactcgcccgaggtgcgctcttgcttcttgtcgtgcgaagcctcgccgatcgccttcttgtccttcttgccgccctcgtttccatgcacagcgtcgtgctcctggaagaagtaggccatgatggccttgccggtcttgtgctcgatctggacccggacggggtgaatctggagaccaaagtactggatgattgcgatgccgccgacgggtgcgaggacgtggaacttgaggttgatgaacggctgggtctgaaggtgcagagggtaagggcgacagatcagcgtcagcccatcggaggcgcatagccagttgcggcgcaccattggctggttccgctggctgctttgccgctcgtagcgtgagagcatctccgggaagagagcatcgggctggccgttgagcgcttggaggtccatgatggcaatctcgatgatgtcggaactgtccttctggctgaggacgctaaactttgactgcttgagcgccgtcttggcgagcaggcgcttgtcggcgctcagcatgttccagctgatctcggacgaggaggcctcaaacttgaaggacgattggttcgttttgtcctcggcgtcgcggggatcctgggcggcggcgatcgcgaggaagaggagatcgagctcgtcgacgagctggcgcttctcggctttgagcgcggcgagctcgacgctgtgctcgagccggcgccgatccgtgttggcgcggaggttcgtctgcatgcggtcgatgacgcggatgcggtgctggagatgccggacaatctcgacagcctctgacaggttcgagtggtcgaacgagtaaatgaagtcgtcgagccgcttgttgcgctcgcgctcgaccgagtcctggtaaaggaggaggtcggtgacgacgttgtacagctgcgagagggtagacaagacgcgagtgagcgtcagatgagcacgcagcaaaacaatgacgtccagggcagcgcaccgccgcgaattgcttgggatcggaagtgactgcgaggcgaggaacattgacgacggcaaggtcctggagcgagcgcgataacagacttgtcagtgtgaagatgaccgagagccggccgagggaaagagcattgggacgcaccatattgtggcggaggtggtgggtgtcttgcgaggtgagatcgcatgacagctgcgtcgaccgggacgtgttgcggagccggagctgattgaacttgtcgtgctggagcgaagcactcgtctgcgggatgatgcgctcgaagtcgctcgtttgcgatcggacgtcgagcaagatctcgagcgggacaaagtcggcccgctcctggtcacggtcggccgggtagaaggcctgcattgctgtcagagtcatatacgacctgcaggattcagagggagagtcagagaagggcggaaggacgagactggcggatggcggagcacgtaccgccgcatgacgcgcgagttgaccgggtcgtcgaggtcccgctcgtcgaggacgccgtacatcttgaggttggcgctcatggcggcaaagacgacgacgctgtcatcgttgagcgagctccggaaggcgatctgcggctttacgaggatgaaggaatagttctgctgaatttgcatgccctccgagagcccctcccaggggtcgggcgtcggcggccggccgttgtcatggtgcacaaatgtccgcttggcctcttgaggctcggagctcgcgacctcaggctggtcacccgagatcatgttaagcagcccggtcgcaagagctgagcccgagctccggccggtgctgaatctcgacgacttcttgtgagagcgagcgggcgctgctgcagctgggtgaaaatgctggctcgccgagggcgcgggcgcaggcttcgtcgcccgctgcgccgtcatctcgcggacaaacttgacggcgctgagaggtaggagaagacaaagagggtcagccagggtgtcggtcagcctgtgcagagtcgacaacgacttacagggcggacatgtggtattcgaagcctcgccgagcgcgcgagtggtaatagtctgaaaaggaatgacgatgggctgtcagcgcatgccacctctgaccgactcgaggtcatccgtcagacctcacacttcaggcagatctggaaaacgacacgcacggcaagattgtcagcttctcggtcggcccgaacgagacgcaaatactctggcgacgtacgttacgggcgtcgttcgtccaagtgatgtgcggatgatggacttggatgacgttgtcgaagctctcccaggcgtcagatgccgtctgagcgccggcgctctgcgtgtcgtccggcgccttcgacagattgatcgtatccttccagacggcctgctcgctcagctcgttcggcttatggcgtgacttggtgctggccaactcctttttgaggtcgttgatgtgatcctgcaggaggacgatcttcttgagcagcgagcggtccgccggcgtgtcgtcctgttgcggccaaagcacgggtcagcgacattagcttcatctgaagcctcgtagacagacgcacgtcgaccgggatgccttcgacctcggcgtccttcttggaggcccggccgcagcgcagcttgtcgagcgtctgctcgacgtcctcgaggcggcgctccgcgagatcaatctgcagctgcagggggtctgtcgaagccaaacgaagatcttagcagggctcactgcttgcgctgacgaagaggcactagaattcacctttcgactggtcgaggtggcagaggtgggtaggctcgtgcccaaatttggacgtctcctcgaggatgggcgacgcctccttgttgctgccctggctgcctttactgcggcgctgcaaaggggcggagcgcggtcgcttcctgtcacaaaagttgaccgacaaagggcggacgagtcagcgtctcgagaggtgggctgcgagcgatagctgggagggacgtacttgaaggtgaagcgcgggcagacgccgatctggtggagctcgattttggcgttgtcgtccgggcaggcgcgatccgtctcgacgaggtcatcgcagtcgcgccacgaggagtcgggcagctcggtcggggcgataaagaccgggtcgtcagggatgtcatcgacgacctccttcacttcggccttctcgggctcgcggcagagtgccgagacggctcgcaggtcgatgtcgtcgagcacaatgtcggccgcgtagaagggcttgtctgcacaatcgagggcaaagcggtcaatcgtcaaaagctgttatcaaagggggacgtcaccgaacgcacgagggatgcgcttcgtccgcccgagcttctcattcgtgacagtccgctcttgctccctctggtgcaggtcggcccggaacttggcgagcttgaccttgatgccgaggtaggtaccgaggcctgcaagaggatagcaatcgacaggctcggatcaatgtctcggcggaccggagcgagccttgtgcagagagtgacggaccctggtcccagtctgagcggctatcgttcgcgtagaggtgactgatgaagagaggtgcgatgtcgaaacggtactgcgggtgcggagtttagagaagatgcgtcagtcgacgacgggagcggtgccacattctgtgcaggcggaccttaattgtcgcgaggctcttgccaaacttcttggacggcggtggcgagttcggaaacagcttgccttgccggatcggcagactcatgttgccgccaaaaagccttcagcactcgaacaaggaggcgaaagatcagcctctgcacaggaggacgcgacagccaaagcgagtgccgacacgtaccgccaccacgcgaaaaagtgcgtgaagcctttcggcgagaagtggaacgagttgtagccgggcggagcgccgtcctcggtcggacaatgccggtttgtcggcgaagtgatcgacatcgagaagtggatgtagtcggagcggaagccgtggtacgagtcgttcttctgttgaaagaggcgcgagcgagagggaggtcagcaaccactgggaggagctttaagagggcagacgtgccttctggtcgatctggtgctcttcgagcgcctcgggcgtccgcaagacaaccttccagtgcggcgcaaagtcgaagatgcgacactggcggtctcgatttgagccagagcaatcctccttgcagtcgccgtcggtgcaggttcgttcgagaaaaaagccccagccagcccgggctccgttggtgaacttggcgcagatctttgagtaaagtgcggccgacgtccggtcctcgcgcgccttgtcaatcttggcgtcgtcccggccgcccttgccgtcgacgtggccggtcgcacggtgatcgaggaggccacggaaactgcggcaatgaacgtgtcggtcagtctcttggctcaacggtggccgtacatcccacggaacgcactctgggatggcaaagtagaggttgtcggcctcgatttggacgagctcgcgcgcaacgttcggcttgttgattgaaattctcggtgagccggaccaagcgaggacgaagccggctccatgatcctgaagcggcgaaggaagaggagttcagcagatgcgccggcaagtctctcggacaggaatcgaagcgaccgacgacgatgttgtagggattgcgcgagcctgcgtgtatcgcaaaccgcggtcagtcggcctgcgctcgagggaggtgtcagagggggcggtggggcgcacctttcgcgtgaatgtggaccgggcccttgaaagtccattcgactgaccagtggaagacgagccggagcttgtcccagaagccaatccgcggcgatgaatcgcgaggcgggtgcgtcaaggtctgaggtgagaagccgagcgtcagaaggagcgggcgacacgcaagggagagagggctgattgcgcacctcaaagaccttcatcatgtcctgcacgccgggctgcatcgaagaaccccagccccaagaggtgacctgggagctgttgacgcggatcgtcggccgagcgtacgtcttgaccggcatgatcgtcttggcgaccttgagccgaaagggcgcagcgccctgctcgccaagatcggccgggatgacgtcggtcgggatccagaagaacgagtcggccccagccatctcctcgccaatgacgatgtccgactcaaactcgaaggccttgcgcgacgcgccgtcggcgatggtcattggcggcaggttaaagagcgggaccgggtagtcacgcaaaatgacgcgggccgtgtccatccgccacgacaggtgaagcggcacgagcagcgaaaagtcggtgtccttcggcaggccgctgccggcgtcgtgcatgaaggccgagagctcgtcgagcggaaaggatggcggggtgatgtcaatcgcgaccccgaagaaagtcattcggaacattgggctgcaacgctcgtcgggcatgacgtcgatcggcagccgtgcctctcgcttggtgttcgcctggatctgtggcagcgcgcgagacgtctatcagcggccgtctaccattagctggggtattcgcgacaaagcaacggacttggcggaggtgggtcgtctccttgcgggcgtgctcgtcaagggcattgcggaagcggcggacgtagttggttgagttgaagagcttgaggcgctcgcgagcctcgaccacgtcgaccgtgtgctgcccgccaaatttccagcggctcgagtgctgcgagaggtgcggcgacgccgagtcggagccgagatctcgcttctcagccttctcgatcgcagcgaccttggcctcaaacgcttcgttgcgctcgagacgagcgctctgctcagccatctgttgagtaaggcaaccgagaaggaggtcggtcatcagcgtatgacgcgagaggaacaaggacacggcctactcacgccgactcgccagatcaggttgagccctaagagcagaagaaggaaggcgtcagatgtaagtctccgccgagatgaaagaaccactcgggcggcacgtactcgtctccattgggtcatcttgggcctcaaagcagagcgaggcgcagcggaattgaatattgtggaaacgcttcggcccttgaaccttgggctcaacgagcagctcaaaatcggcggccttaaagagggcaagcagatgcttgatcgacttgagcgtgatgttcacattgagaatgagttgcgaaagcttgaagccgtactgcaggcggcgacagaagggtctgggttcagtatcggcccagcgagaagagtggctagtcacacacggaccgggatacgcagccgagtcgtctttatcgatgctgtgacagtgttgccgccgagcttggcaagccggagcgtcttaatcgtcaggagctcgtcccaaagagctggctgccggatgttgggcacgaaggccagcacactgtcgaccgcgagggcgggcccctcggcgtggagtgagccggccactttgcgcgcgcgcaggaagagacgctcgccgagagggagctcgaggtcgacgtgcaggaggttggcgtccaggcgtatgtcgaagtactctgctagagatgagcggctggcggccgacggaaccggctcgggctggctgtccgagggcaccttcgtgcgaagagccttgagcccttcgcaagcgaccaggactgcccaagcgtgcgacaggtcgagacgcgcgctcaaaagaggtagcgtcaccgccaaaaggtgcttcgagggcttagccggggtgtggcgaaggatggcgcggaccttaatcgaggggattcggagcggcgagcttgcccgctcggccggcgacagcgagaaggggtcggcccggacctgcgtcgcccaggggagctcgtccgacttctgtttgtcgtcctgaaagtcccagccgacgagtgacgcggtcttgtcgggcagcggcggccggtgcgggaacatatcggtgaaggctttgaactcgccctcgacgttcggtccggtcgtccggaagcgccggccgttgaagacggggcgaatgcgcgtctcgtgagcgcaaacgccgaagagggccgagcgaccgttcgggtcggcgttgtcattcgtgtgcgacacgccctggacgatgacgtcttcctcgaggtgcagcgccgtccgcaacgaggccgtccgcgtagagtgctgcagcgcgtggtgcttcgtaagctggcaaaattgggcgatcagccgtgtcctgccggccagaccacgcagtggatttttggtgcaggcagggttgggatcggcggcggcgacgaggacgtcaacccgagcgaggcagaggtagaccgtcagacctgtcggcagccgttggagaagcgcctcggctgggctgtggaattgagacgagctcggggcctcagctcggttggccggtggatgcgtcgcagcgcgtcggaagcacgacaaggcctcgatgcactcggcgaggcgcgagatgagctcggggtcccaaagctcgatgaggatgatgccgacggcgacgttgacattgcccagcgcttccgaaggctgcagcgtcgtctcgtcgcggtaggccaggctctggtcgtccttgatcgtcgacgtcgtgccgggaacgatcgcccgaccgccaagctcggacgtctcgaccttgatgatgggtggcgcgatgtcggtcgtcggccgagagggatcggacgaggtggcgacgcgcacgcagagctcgaacggctgcacggtggccgcagctcggatgacgtacgccagatcctgctcaggcgaggaggtaaattgttctggccagtgctttagcggcgtgatctgtttgcctttgctgtaggaggcggatgccggcgacagcggagaagtgttagttaccgatcacgggaagggcgagacgaggatgagagggacgcacgttttggatcgacggacgacgtcccgtgcctcagtctcgaggttgaggctcgcgcccgagcagtcgaaggcgagcagattgtcctcgcttggcttggtgaaggacgacacagccagctcggccttggaccggccgagggtcgcagcaaagacgatgtgcggcggcacgcccgtcgaaaacggcttcaatgagtcgggcgacgtcccctcctgcggcgagactgaggccgacggattgcgatgccgtttccgcgcccgaagaaggccctggagccgccgcaggtcgacgacgtgcatgccgagctcgatgcttctcaagtcggcgatgcaagcgatcaggcccggatcggtctgcttgttgcgagcagagccgaggcaggtcgtaaagacctcgaccgagggggcttcgagcgtgagggtggaaggcaggccaggccgatcatgagcgctggcatccccgttccgcgatcggggaagcaccgagacctggacggcatcggccccggcgagaaaggtatggccttggacgtcgggcgccagaccggcccagtcacggtgcaggcgacttgagtcggcagacgaggcccggccttcgatctgcacgctgaggagcacgagttcgagcgccaggagctctgacagcgacgccacgccttcggccgcgtcgctcgcgccagagtatctcgcgcgaatccgcttgacgtggacgcggacgtctccaacagcctcgagcggatgcggcgtcttgcgagatgctgaaggctggacgacacgctgccgagggctgtacgagattgacgacgcggcgacgacctgcttgcgccggatctggagatcctcgagccggttgacgtcgacactcaggtcgccctggagctcggcccatagcttgatggagcgggggctcagaagaccgacaccaggcccaaaagtgtgaccgagtgcgagcttgatcggaccgccgagcgagataagaggcaccacgaggtcgcttgcttcgggcgagaccttgcctggcgacgacgacgaggtcagggttgcggccgcgaagacgttcgagagcgaggcgtacgagccgttgcgccgcgggtgcgagccctcgcctcgcttggaatcttttccgacgctgctgaaccaggcgaggccgctcgcgatgcgcttgaggccgctagaaatctcgcccgccgggagcgcacggacctcgagggtacctcggggcccgcactcgagcgcgagcgaggcgtcgcctgctgcccgcccaaggccgcgctggaggatggccatggccgacgagcggaaccgtttggcgggcaggccgtagccgaccttcggggcagcgaccgtctgtgaccgccggcgaggtgccggcgctgtcgagagctcgatgttggcgtgcaggcgcaggccgcccatgagggccgcttcgaggccgagcgttggtcgcgagccaaagtcatcctcagcactctcttgaatgagacggcaaatggttgagccagtgaactcgacgtcgatgacttggacgagtgtcggcagcgtattgagcgcgctgcgcagccagcgctcggccagccgccgcgcctggtacttgtactgcgaccagagccggttgccgaacgacggcgttagatcgggcgagaagtaggagccggtcgcgttgttgagcgcgctcggcgagagcggcgagaggagggccgaccgaggcttcgacggcgaggtcggcgagaagggtggcgaggtcgacccaaacgagccgtcagcatctgccgtcgtcggggagcaagtcgagaacgacgggtccgccggcgagacgggactcgaaggcagcgaaccatcctgcgactctccgggcaggccggcagtgtcgcgcacgacgacgcgcagatcctcgacgacgaccgtcagccatgaggtaatccctcgcgacttgtggctccgatgaaacttgtagccgaccctggataacgaagggcgactgcaggtcagtagactgagtagagacccgagccggcctgcccaggacgcgaggtagcccggccgccggctctcagccggcggagccgtgcgacgggagcacgcacctctcgactcgcacgctcacagcctgctccctcccgccgcgccggcgtctgtgccgccactcgagcccgcggattgagcgcaggctaacggtccggatcgagacgtgccggctgagcaggttcgtcaaggccggcaggacccgccgaaggatgtagacggtgccgacccagagggcgacgagagtgacgagcgtctggaccgtctgcttgagcgcgaccatcgcgccgcttgcggccgctccgaggctgccggcgggaagctgaagggaggcagagatcagagcaggctaccggatcgtcgaccgctgggcgaggacgaggcgcgtcctggcagatgatgagctgctgggaggatcgagggcccgttcgtcagctctctgtctcctgcgagctgaatgacgcgcgcgcagacgcgaggtggctggcccgggagttgcaggacggtgagcacactcaccttgcagaggaatgggtcgtataggaggagaaggaggaggagagcacgaccgagaccgtgaggaaatagggctggaggaaaggaggatccggtgacagggaggatcaggccgtcgtgccgctgcccaaagcaactccggctcggccgccgttccaggcgtcgggcctccccagcccgggtcgaccttcgtcctcaacctcgaccacgcccatactcgacacgaccctactctaagcaaacgactcggacagcttcctagcactaccctgtccccaagtagaccgagcttgccgcaggaagccacgtcgccggctatgaccgcgcctcttccaaccgccgcctcgtcgtcgtcgagccctccacctactccggccgccgcgtcctcatccgctcggccgacgcccgagtcgaacccgcgcttcttcggctggctctcgtcgctctctcgcacgacgggcctcggactctcagcggcttcgacgctcgagagtggcagcggcgggcggacgatcaagcagctcgagcaggacgagcgcgactggaatcagtgcgaggcctggaagagctacctgatggagtggggtgagtctgcgctcagaagtttcttggacgtgctctggaaggctgattgggaacgtcctctgctcgccagacccgtcggtcgtcttcatcttgaagcacctcaagctgtcgggctgcgagacgacgaacgagagcatccactgcgccccgtgcgacgcgaccaaggccggcggcttcagctcggaccacggcgtcctactttgccaggaccggctcactaacaagagtcacatgggtgtacgtcgggcgatcgactggaagtggccgacctttgcgctgaacctcttcttttgcccgctggttctctgacgcaggacacgctcagccacgagctcctccacatgtatgaccactgcaagttcaaggtcgactgggccaacctcaggcaccatgcctgctccgaggtgcggaggctcttcgtctccttgacgggtcaatggctgaccctcagtccccggtgctgctcagatccgggccgccaacctgtcgggtgactgcgcctggtggcaggaggtccaacgcggcaactacagcccatcagatgcacagaaggtccttcccctttgcatgtccctggcgactggcgcgctcgcaactgatgctgcagccgctttgactggcctcgacctgcccgcttgcagaagtgcgtgcgccgccgagccgtcttgagcgtcgagagcaacccgaactgcaagagccgggccgaggccgagcaggccgtcgacgacgtctgggacagctgcaaggccgacacgcgaccgttcgatcggttgtacaaatgaagcttcctctgcctcggccggccggccgccgcctccgcagggccgtatgccgtctctcagtcgccttcctcagtcgcgcttaccggccttgcggtcgcgctcgcgctggtcctcctgctcctcacggaaggcgaccgtgacatagccgacgaggacgacgttggcgacgacgacggccgagatggcggcgtacgtcgagttgcctgtgagcgcgcgcgtcgtactaccgtcgcgtcagcagcagcttcgcaagaacgacagcgctctggctagagccgcaccttcaaagtagcggagagacgagaagtaggtgccgatcggggcgagggccatcgcgactgagaaactgatgagcttcatgagcacgcccttctgcctgtgcgaggggatctcaggcgagagtcagcgtgctgctgctgctgcgagtagctccatcaagccgagccgtcaccggtccgagcgactgcagagacgagagacagcggggacgtacgcctcggcatctgcgaccgacatcttgcctactgatccactgctcatgcttcgaaagacggagaggttagggaggaaagcgggggtcggtgttgggaggacttcgctgagcgagccgatcctcgccgagatggtcgccctcgccccgaaccagcaaccgctacctcactctctctactcttctcacataaactgcaccccagcagccaccatgaagctcgctctccctcgccttggctcgctcctccgaccggccgtgcagccaatgcggctcgctcggcctgccgccgccgccgccttccactcgaccgcgcgtgcaccgcagccggccaagacgggcagcggcattccctttgtctcgatctacacccaggacagcgacattggcgccgtcatcggaggcctgtcggccgacgggattgagctctccgctccggccgacctcgtcatcccgggcagcgcgatcatcctcggcgggcggacgctgctctgggatgtaaagccgccggccaagggcgaggagctcagctggaagggctggcaggaggatgcgttcaaggtgttcgaggttgttggccctcggccaggtcagtcgccctgctgcttgactggtcgtgggagaggtgggctgaccacgattatctccacggcgagcagagatgctcctgctcgggacaggcgagcggacgctgccaccaccgccgtttctccgggcctacctgtcaaagctcggcatccagctcgacatcatgtcgacggtacgtctcgccgtcttgagttgtgcgccattccagcagactgaccaaggtggcctccgactacagcgcgatgcgtgctcgacatacaacctgctcgccgaggagggccgcgcggtcgccgtcgccctcatctcgctgaagccagtcaacgtccggaggccttctctggcatgatccctgcccggatatctccgcgcccttctcgctttagcagccgttcttggcagatcgcagaagggtcatgcgcatcagacccgattctcggcgcgccaactgtcgatcaggccatccaacccttgcgctgccagaccggcagcgatgcagtctccgaggtcctcgatctccgcagggaagatgacgcgcacgctgagcgcgtcctctttctccgtagccagtgcgtgggcgagcgcaaaggttcgacgttgtgccactgagctgcgctgctgaatcaggctggcgaaccctgggccgagctccatcgtgcggcagagctcgtagttgtgccggaggttgtacagcagccagcgcatgagactacgagctggaggaggctcctcgcccgttgtcgtgccgagatgcgtcgcgtccagccggacagtcgtgacgagcgcggtgtcggtgaaagctggctcattcaatactagttcggctggtaccccgagcgtgatgggtcctggaagctctgctatgcagaggatggcgccgcagagccgggtgtcgatctcgccggtcatgcaaagcgttcggaggccgcgcagacgctcgaggatcgcgacgacgtgcccggcctcgttgccaagcgtttcgccgacgtcgcgctggtcgtgcaggatagcgtcgttggcggcgccgttcctgagctgctcgtcggtgtaggaccagtacgaggtctctggcgaccggggctcgacggccatgtcgaccgaaacgatgtttgaccggatgcaagggaaccgggccagctgcgcctggagccgctcgttcagcgttgtgtccttgctgccgtccgggtgcaccttgtagggccgaagccgcttccagtcgtcgacacctatgcggagatgtcttacgtggtcgacgatgggggcaagggcgtcttgtcgctcgcaggcgatgacgaacgcccaccggcgcccgtacgacgtcaggtcgagcacgcggccgaagcgcggcaacagatcggcgcaaaaggcacggctcatgcgaaggagggctgggtccaatgaggcactatcgactgggacgtgcgagagtatgagcgttcgcagctcggggatatcgaactggttggcggccggcgaaggagtgggtgcctccatcgtgggtgagggcagggcgttcaggagaggcacctggcagggaccatgagcagcaaggtcctgtcagctggcaaacgtctgcctatcattctcaatctcaggacagacgataaagagtcaagttagctaggctcgggtcgacgtcaacaccatctgctcagcccaggggcagggccgcagggggaggccgctcgctgcgccgggcgaggttctcacggctctgccagagcaactcgtcgaagccctcaacctcttcctcctgcacctccgacgacctcaactctcacacccagcctcgcctgcgaccgaccacagactcaaaagactagccttggtgcgtctagagttgagctgctcttctctagctttgtcgcgcgccgctgacttcccgcgggagaccgcctgccgctctccttccagctcgacccggcgacccttccgaaaacctcctcccaactagaccacaacgtctctctactccttctcttttctacttcatcatggcgaccatcgcggcgaggatcaaagaagttgaggacgagatggggaggacccagaagaacaaggtcggttcagggtgttgtatctgctcttctccgaccatgacgctgacgtctcgtccgcgctctcctctgctttctaggccacgtcgtccgtccctctttgcctccagccgcggcctactctttgccttacgactggctgatcgtgctctctcggccgctctgctgattccaggtaccacctcggtcagctcaaggccaagctggccaagctgaagcgcgagctcattgctccgcctgccggctcccagggcggcggtgccggagccggcttcgacgtagcgaggactggtattgcctcggtcggcttcattggcgtgcgtcctagacctcggagatggctggatggtcgaagaagggccttacgtcgggctgcttgagctgatcttccaccccgcccgcttgtagttcccgtccgtcggaaagtcgacgctcatgtcgaaactcacgggcacgcactcggaggctgcctcgtacgagttcacgaccctcacgaccgtcccaggaacgatccaggtccacggctgcccgatccagattctcgacttgcgtaagtctctcggaaagtcctttgcgctcggcgaagacggctgttgacgtgtaactcgctgcagccggtatcattgagggagccaaggacggcaagggtcgtggtcggcaggtcattgccgtcgcgcgaacgtgcaacctcatcttcatcgtcctcgacgttctcaagccgctcggcgacctcggcatcatccagaaggagctcgagggtttcggcatccggctcaacaagaagccgccgcagatgtgcgtcctggctgctggacgattctggcgtgcgatgctctgatactgacgttctaacctttttgtcgcttgcagcaccgtcaagaagaaggagaagggtggagtgcgtccccggaaggaggctctccttgccggcctgggctgacctgaaccgtaccacctactccagatcaacatcacaaacaccgtcccgctgacgcacatcgatgccgacgagattcgtgccgtcctgctcgagtataagctcaactcgtgcgacgtctcgatccgccagcccgacgcgacgctcgaggagctcattgacgtcatcgagggcaaccgcgtctacatgccggcgctctacatcctcaacaagattgacgccatctcgatcgaggagctcgacctgctgtacaagatcccgatgagcgtaccagtctcgagttcgatgtggctcaacattgacgagctgatcgaggtacgttcttcctcgtcctcgctcagctgggcgcctgctttgtgcggcggtcactgactctgccttgcatccttgcactttcctcctcgtagtcgatgtggagcgcgctcgacctcgtccgtgtttacaccaagccgcagggccgcatgcccgactacagcgcccccgtcgtcctcaagcggtcgaagtgcactgtcgagaacttctgtgcgtcgctgcctcgtgaaggagctttgtcggctgccgacatgccgctgattcttctctctcatcccgcctgcaggtgacgctattcacagcgagttccatcgaccttcaatgttggctgctgcatgacctcaacgctgaccatttgtgctctttcggccccctgcagaggaaatcgctaaaaactttaagtctgcgctcgttctcggcacctcggccaagcactcgcgtggccagaaggtcggcctcgaccgtgagtgctgggcttgctggattcgcagaggacgatgtgaaagctgacgtcctcgttttcacgctcgccgctcgcagacgttctcgaggacgaggacgtcatcaccatcttcaagcgctgagggaggacatcggcgagtgctgtatcgattctctgtacacgagcgagctcaggccgaggccaacgcaaacatcgcgcgagtcagagcatctgcacccatccgaggcttcgattgcctggggtttcaccgactagactggtcgcagtgaagcgcggtcgagacgtcatgggcatgagcatagagagatttgtctaagagtgtagattagagcaaggcacgtcgggtggccaaggaagaagacagaatcagggctaaagggatgcgacaggcgcggagcggaggttcgtgaggggccgagatacatgtgcgacaggcagaggcttaagctacaggtgtggtgatcggagctttgaaagagggaggggagggatggtcggatcgagaagagggtggtgcaggcatcaaaagctgtttatcgtgtccttagtcgctttgagcgcctgattcttggagcggaggtcctggacagacactgtcagccggcggatctcctcggctgataagaccaacgacttaagagggtcagctcggtcgcaacggtgagtgcgaggcggtcaacatggaagactcacctcgctcgtcgatctgcttctggaggtcgaccacgaggtttttgcgccgattacggaaggcagctgcgctcgctcggttagctggcaagatgtgaaatgagagctcggtcagccggcaggttgacgagaaccagagcatggcagcgggtgcgaacgcactggctttccggcgctccttcttgctcagctttgacttgtcggccttgccgcccttgctctcgggctcgtcgtcgtcgttctcgtcgtcatcttcgtcgtcgtcctcggatccgcccgtcgtcgactcgtcgaatgagaccttggttcgggcggctaccgccttgggtctggacttgggccgggcagtaggaaccgccttggcctttttcgccgccggccgggctgtgggcggtgcgatggaggccgatccggcgatctcggtctcgagctcgacgcctgtcgacggagcagaccgtttgcgggccatcttgcgcggcggcgacggcttctcgaggctggcgtcgtcgggctcgggtgttagaagagccactatcgggacgaccatcgcctctaccgacgtcgacggaggctcgaccattgtgctagccatcccgggccacagaggcgacagttccacttccgagtcaaaaacgaccgccggcgtgggcaaagccagatgggactggcagtcgaggagtgggtgctccgtctggattctgacggccgactcggccaggctagaggcggccagctcggccaaccgtccgccgctgttgtcggcccaaaaaatgtcgcacgggctggcggcgctgcccgagattgtgctggaggacagaatgagcggcaggtcggaaatgactgagccgtacggctctgcgtcgggcgatgggacagagtggtcagcccgaaccgaaatcaatgtggcaaggccgagcccgagaacgcgcaccaaacgattggagccaagacgcaaagccgtcgagctgatcgaccgcgctgggcgcagccttgtcgacaaagggcgacatcgtcggcgacgaaggataggaggcgccggcgtggtgctgtgggaggtgaccgctcagatcggccgaagggtcgtcgagcgggcggtcgtgctgcgcgattggaaaggggtcgagcgctcgccagctctcgacaaagagggcggtgcccgagccgaagccgaggtcgaagccgaggtcggtcagggcgccgtcgtcgtcgtggccggctggcggagcgcctgctgacggtccgacggacgagctggccgccgataggtcagtggcgacgtcggcaggcatgcttggacctgccgtagcggccggcgagggtggctgcttcactgccccctgactggagtcgaggaagctgtagtcaaagggcgatggaacgaagccgtaggtgcggtgctggtcgaacatgggtgtgcgagatgggggtcgagagggaagaagagaggactgcttgagcggctcaaggccttctaaagtgagcgccggccggccggccgaccagcacgccctgcccaccagcttgttgggtcaagtcggtctccacgcgaaagggggaatcatgccggccggtctgccggaaagcgccggcttggtcgggcatgagcagcacgcaaagaaaggagctcaccggctcggcccggctcccctccgacgggctgagcctcgtcagcaagagacgaggtcggaagctcgtactcgtctctgccctggctcgacagtctctgcgcctgtctgaccgcactgtcgagcctcccaacaccctctcgcctccttcagcgcctcttcagcggactaacggccgggccggggccctgcacatgctgcgtcggcacgctgctatcaagagcaatctcggtcgccgacggcaaacaaactcactctcaactcaaaacgtggaccccttattagcgatcgagaaagctgagcagctcgcagcagatgctcggcacccgcctcctccctttgcgccgtctatcgcacgtcggctcggccatcttgcccgccatcaggtgtctggcccgaaaaaaggaaagagtgccttgcctcctcttctgatggaggccgcgtggatccgagccgttggtttggtcttcgttcacgctcggctcgcaagctttcttcctcctcaacttgcttccgccatgcagtatgcagcccgtcttgaacctcttgccttcacgctgactagagtcgagcgcgacttgtcgatccttccttctctcatccttcactgccttcgacagacgctgtgggacagcaacttgacaaaggcgacgtaagctgctcgaaggaaatgaaaaggctgcggtcgtcggccggccaaaccggccagctgctcgcccgaagcgggtcgacaacagacaggccgctgagaactcgtacttcagcggaagggtcaggcagcgctaatctgttactcggagcgagagttgctggccgatgtgcctcggcagggaagggagggaaaagcaggaccgaccggggccggcggtaaacgacaaggggcgccggcggacaagagcggcaggtagtgaaagaccggtcggtcggccgaagggtggtagcctcggctgggcgacgatcgggaggagggaggtgaagagacaggcgcgccgcgagtcggacggttggtcacacgctcgatcacgggaggacgaacggttcccaggcacaacagtcagccgcccgaccctcccagtgagcgacagcgatcgttcataagtcaatgttccattttagccagcctcgagagcccctttatgcgagcagctcgcgcaggaccttcacctgccgagtcaccatctcgcggctcggtccgccaatcgcgttgcgcttctcgatcgaccgctcaaaatcaaagacgtcggcaaagacgtcctggctgaacttgggcgacagctgctggtactgctcgagggaaaggtcggccagaccggtctggagcgtctcggccagggcgacggcgcggccagagatgtggtgtgtctcgcggaacgggacctgtgggcgtgggaaggggtgataagctcaagagcggcttggagagcggtcaaaaggactcgacgtacacccttacggacgaggtagtcggccaggtcagtcgccatcatgtcggtcgtcagagcggcctccatcttgtcggcgttgatctgggaggcggggagcaagaggggagatcaggcgtgagcgaggccgaccgcaagccaggagggtgccgcgacctcgaacgcaccgaaagagtggcaacgacgccctcaaggatctggagcgaggcagacatcgtgtcgacgcagtcgtacatgggctcctggcactcctggaggtctacggaaggtcagtcgggcgaatccgtcagcgatagggtcgactcgagactgcgatggcgaggacggacccttgttgtacgtgctgggcagacccttcagcgtcatcatgaagccagccatcgagccgaagacgcgaccggccttgccgcgaaggagctcgagcgagtcggggttctgttcgaccgagggtgatcagcgtggcgtcttctcgcgagagtccaaggcgacgcaccttcttctggggcatcatcgacgagccagtcctgggcacggaagcatcagcttctgcgaaccctccccccacaggcgacaggaacgactcacgagtaggcgtccgagagctggacaaagccgaactcggcggttgagtagatgatgaggtcctcggcgatgcgcgagacgtggcccatgcacattgccgcccactggaggaactcgacgataaagtcgcggtcgccggtgccaaagagcgagttctcggcaacggtcgcaaagccgagctccttgcagaggaagtcgcggtcgacgaggaaggggttgccggcgagcgcgcccgagccgagcgggaggaccgagatgcgcgggatgagctgctggagccgggcgaggtcggtcgagaacgagaaggcatgcgagagcagcaggtgcgaccaccggatcggctgcgcccgctggaggtgcgtgtagcccggcatgaggacgtcgacctccttctcggcccggtcgaccatgacgttgagcaggcccttcatatggccaagaatcttctcggcctcctccatcagccagagccggaggtcggtcgcgacctggtcgttgcgcgaccggccagtgtgcagcttgccgccgatgtccttgccaatgagctcagacagccgccgctcgttggccgtgtggatgtcctcgtcgtcaggggcgggcacgaactgcgagcaaagcgtgcaagagacaaggagtcaggcccgaaagcgccttgcaaggacccgtcgatcaggagaacgtacacgcttctcctcccactccttggcaacctcaccgaggccgcgttcaatctcaagctgctcgtgctccgagacgatgccgaccttgagcagcgcctttgagtaggcgatcgagccccggacgtcgcacaggtacatgcgctggtcgtacttgaggcattgctgtgggagacgagcgaaagctgtgatcagcgggggtgtggtagggaaacgggcgcgtcggtcgagctgccgttggcggccggaagcgagtgcgagccgggcgaggcgacccgagggagagatgagcggcagacgtacgttaaactcgtgcatgagcggatccgtctcgcctgtccagcataccgcgacacgagcgggtcagtcggcagctcgagccactgagccacctggcagctagcttgggagcgcggcaggagattagaggaggagcggctctcaccggtgaatcgcccgccccagagcttctgcttcgtaaagtcctccttggatgcctatggaatggcgagcatgtcagcagaatgaatgtcgtgatggacagctcgacaggcgcgcaccgccattcttttggtttagtatattgaattgaggatgagttggggagggagacgtcggctgccagccttgtcggcctcgtcgggcggcggcgagcgagtcaggtgttgcccagatatgggctgatggggtctttatttggggctgtggtcccgacttgggaggcgacctgtcacagcgagctcttgacaggggcaggcaagcacgaagcgtcgacctgcttttcctgctcttccacacatgtcgctgccgcactcggtgctctgtctgcaagagccccaacagctgccgacgactaatggcaagatctcgccgctgccgccgccggccgatgacccctgggcgagcgccgccgccgccggtgcctcgcgcttcgtcggcgacctcacctgcaccgaagcagacgagccgctgctgcgacggtcgtcagtcatttgctagctctagcagcgcccagaagccattgctgatttctgccttgctcgtgtagacataagcgactcgtcctgttcccgatccagtagaaggaggtgaggccatcgcccctgtcgttcgcagctgtcgccaccgacggaatgctgacccgctcctgtcgcgcccttcagatctggcaggcgtacaggcaggtcgaaggcagcttttgggcagccgaagaggtcgatctctcgcgtgacgtcggctcctgacaggctcttggaccagacgaggtgcgagcgctcgatcttgcgccggccccgggggtctgcgcgcagctgcgcggccgtcccctttcttccgtacgtcgtcggcagtcgctgacctcgcctgctcttcttcggcagagccggcatctcgcttatgtgctagcttcctttgctacgtccggtgccttcatcgagcgtggcttgctcgagcacctctcgagtgaggtccaggcggcagaggctcggtgcgtgcgaggaggccctcgttaggtcgctggcgagaccttgccggtgacaagccactttcgactgctacaggtgcttgcatggcttccagctcatgaccgagaatgttcacgacgagacctccagcctcctcatcgacgcctttgttccggacgccaaggcgcaggcccggggtttttatgcggtcgagagcagtgagtgcgacgtctatcatccctttgaccttggcactgacgcagtgccatacagattcatcgatctctcagaaggccgcctggactcatcgctggcttcggtcagctccgacctttgccgaccggctcgtcgccttcgcggtcgcgcacgctatcttcctctcttctgcctcgacgatgcttgcttcgctcaagcaggagggcctcctctctggcctgacggcggtgcacgacctcatgatgcgcgatcgagctgcacacgtcgagttcgccgccctcctgtttcaccaccttcgccggcggaagcaccccaccgtcattctcgccgccgtctgcgaggcagtcagcgtcgagcaggagtgcctcgcagacgctccacccacctcgcgcttcgcgctcgatccccagcttgccagccaatacgtcgagttggtcgccgaccggctgctgctggcctttggtggcgacatccactacaatgctcgcaacccgttcgcggtgcgtccagcggagcacgtctcggcgcagtcgtaagccaggctgatccttcctctcgatctgcagttcatcacgaccttcgcagcatgttcctggccccctctgtcgaatctcgactcaacgctgaccggtgcctcatctcgtcctcctccagaccgcacgccagatcactcgtccgctggcgctgccacccctgcgcgcgactcgtccgaccctgacctcttcggcctgcgagtgatcgttctggacgacgagatctggtctgcctatcacgaccgctcatgcttcacgacaacccaccactcacattgtaccaccagcgcattgctcaacccacccctcacgctcatcctgcgcgcctcgcgcgccaccatccgtcacctttcttgttctcaactagcacccgcaccgctcttcgcccatgtcgtcactagcctgtactgcttcgcacccacccttgtagcccttctttgcaacccacccgtcacctgcccttttggcgctctgcttcagcgaaggaaggacatcaatcccactcgtcgccgtcgtcaaaatgagctcgaggctcaaagaagccccgctcatcgtcgccaacggcggtctcggaccccgtctcggctgtcgacttgcccgaactaccgccgccaaagacggcccagaagagacgctcgccctcggccgtgcatcgagcgccgtcctgggtcgtgaagctcacctctgctgagttcggtccgcgcacggcgtggactcgcggatgggatggctcggtgatgaggtcgggcagcgaggcggtgtatgccagctggaaaagcggagggcgagagggggagagggcggcaagaaaaggagcgagcaggccctgagctgatgtcgtgtcgccggccggcagcggtgtcgagaggtagacgacgtctgcgagggagctcgcatgtcagtgtaaggcctggcaatagagcgtcaaagctcagacgcacagtgatccttgggacacgagcccgtgccttcgcccatgaccacgacctggaccgtccgctgaacgtcggcgacgagggagccgggcggaaagacgaggagcgccgtatccggctgcttctctcggctgtcgtggccgttttcgtcagcgttgaagtcgaccggcccgggcggaaggagcggcaccagttctgggaagacgttgaagatggcgaggattcgagcgaaccgagagtcgcacttgccggcaaataccagcgagctcccctggaggctttccggcaggtagtctgggtgcgcaacgagttgcttaccgtagagacggtggctgaagcccttgatctggagcacgatcgggctctcggcatcatccgaccgagccgccactgactcgaccgggttggcgaggatgtagatcgccccctggacagcgccgagccgcgcaaagccctggacaacctcgcccgctccgccgtactgagcaacgaggaacggcgagttgccgtacttgccgacggcctggaggtatgagcgcatgcggacgagggcgggcagtgcctcggatgatggcgacgacgtatgggcgagagcgtaggcgagagacgccgccaacgaggccggcaacgagaaggcccgctcgaagaaggctagaagcgactcgcccggtggcgcttagacaacgacaattgcaagtagatgtcagctccctcgtcaagacgactgcctctaggtcgcgcagacgcaccgccggccagctccgccgagccctcaaagtcgcccgcgatccacagcaggaccttcatcaagctccgcttctcgcgaagactaatcgtcttgtccttgaagacatcctccttactgcctggcacgctctgggcctcgccgacggcaccctctgctgtggctggggtgtagatcgaggtcgactcgagaaggcggaacgtcgagtaacgcgagacgccagacgcgacgagcgtgtcgatcaagggcgaaaccgacgggatcaggagcggcgcgagcgagagcgagtagccccgagaagccttcttgaggtcgtctggcagcggtccgttggtcgatgaggaggacgaggccgggtacgaccattcgaggttggcgtgtcgtcggcgttggttgcgaaggtaggtgctcggtccggcctcgtcggccgccggcgtctgcctggcctgagcccagtcgataagctcggtcaaggagagcgaggcatagtcggagccgtagtagctctcctcgtcgacatgaaggaccgtcttgccggcgtgggcgagcgagctgcagcgccggagatcatgcatgagtgcgtcagctcgcagccagagcgcgggacaaggcgggctgatgcgtacgctgaggcgatcgtctcggacaagccgcagccgaggacgatggcgtcaaagggtggatggtcgagttccatgtgcagcgtggcgctcgtgtctggatcgtgggctgaagcggcgaggtcgaagcaggtggccgtctgagggtcgggctgaaaggggaagagcggcgaaggccggtcgactgtccaactcccttgccctacgacaccatctcgccctccctttgagcagctcttcggcagtcacagcaagtccggcaagcatgccttcaaggtgcgccgctccagcagaggctagccctcgaccaactgacttccacgctgacttcgctcgacggctctgaccgcttcagttccgcctctggcccttcctctgcgcgcaaggaggcgctcctcctcgtcggtacggccttgattccgtcaaatcatgcgaggagcgcagagccgacgacgaaagctcaccttctgcgccgctggcagacatccagaatgacttcctgcccccgaacggcgcgctcgccgtccccgatgcgcgggcgatcctccccgccgttcttgacctcatcgaccggccagagggctggacgctcgtctgcgcttcgctcgactgtaggtcccaatactcctgcgtcggagggatgagaaggggaaagagatcggtagatgatggctgggggacgacacacagtagggagaggccgatggggaacctatactcacacgagggagccttcgcagccggctgctgatcccgattcgtgtctctcgctctcagcacaccctgcaggtcacatctcatttgcgtcgtcgcacgacgaccgcaagccattcgaaatgattccagtcccgctcgaggacgccagcgccgacgggggccggacgatcgaccagatgctctggtgcgctgacctcttcgctcgagtgacgtgacgccgcgcttctccattgacgctcgcgacgctccaggcccgaccactgcgtgaccgacactgagggttgggagctcgagtcgtcactgcgtgcgctgctcgccgagaaggagcgtgacggtctccggatcgagtgggtccgcaagggcacggataagtcgatcgacgcctattccgccttttccgatgcgagttctcgtccccccctcgacccaggaatgaccgtcgctgaccatgcaccgtcgcctacgcctcatagaaccagtactcgctcttcacgccgctcgctcagcttctctttgcaagcggtgtcacgcatctgacggtagttggcctcgctctcgattattgcgttcgcgcgagtgtgctagacggccgcaagttcgggttcgaagtgacggtccatcgggcgggcgtccgcggcgtcaaggctggggacgatgagcgggtgtttgacgagttccgccgaaagggcgtgacggtcgtttgaatggcagtgcgcgcagaccttctgatgccggttgctgcaccacctactctcggcagcagtcataatcaagcgcatgtattacagaaccttccgggcgtaggggaaagccgcgtcagctccagcatcaaaagcgtcgcgtgaaagaggaggacgcaccttaggtgccatgctgatgacctttccccagcggcccgacttcctcagctcggcactgacggcgcccgagatgcgcgagccgatcatctcacccttctggttgagcaagacgcacgcattgtcgtcaaagcggatcgtccggccgtcgggccgtgcaatcgccttcttcgtcctactcgacgggaaggatcaacgtcgcgtcagccgtctgacctgctagactcgcgaaggggggagcgaggacgcaccggatgatgactgcccgccggacgtctcctcgccgaaccttctgcgcggcagcctgcatgtgtgccggcgcgtccttgtccatgagcgcgattggccgagccttcgagacgacgacggtcacctcgtcacctgcaggcgagacgcgaggaggagagcttctgttagccgaaaagcccgaggaaaccacccgaagacgctgtcaatcgcttagcatctgtccgcggcccacgagcagccctgcggcaaaaggcgaggcctgtggtgggtctgcgaaaggtgtcatcgagttcgacgacgggccgatgcccgaagctggaagagctcgagctcccggaggtgccagagccagcgagagtctcttttgagcctgcctggtgaaagccagggccgacgtgagaagtctcgtccagccacctcgaggcaagaagaaaggcgaactggcagctggtcggacgagccagagctgcttggtctagaccgcggctcgacctctccccgcctcgagcttcggtcggaacgcgagcgacagaggcaagagatttaccgacggtaccgtgcgcgtgcgctccatgcttcagaacatcgatgacggtcgcaattaggcctcccgagttgtctgccacctgtcagggaggggaggagagctgcggtcagcccgagcagtcagaagggggcggctgagccaggcgggacgaaccaggcaccgcgaacgcagaccgagcattgccggattctttttcgagaggagatcggcctagagccggtgacagtgggtggcaaggggagtcgagaacaggggcgaggcggaagttgagcgaggcaagggtgagtgaagggagcgcaagagagggctcgtcaggcggccgcggagacgacggcgcggcgcaacacctggctctcgccggacggagactcatcagccgcagcggggtacacttgcttcagatggccgctgctcaatcgtgaagcgcatgagatgggaaaagaagcaaggagagcacaagacaagatcaaggggtcgcgaagacgagatgggacgaagagagggcgaagagtgggagccgggcgccgagaccgccgaaggggtcgagaaccaagagaaaaggcgagggggataggagccgagggttacagttggagcagatccgggggtggagattgtggtacagagagacagtgtccgattagatagaagagaagatctaggatgcgaggcggactacatcgcctcgccgatgagaccgcgacgcttgttcccgccccggacacgaacggtctgctcggggtcctcggcttcgccgtcgtcggcgagcgcggcggccgacgtccacttgatgcgagcgagtgcgtcgaggtcgagcgacgagtctctggccgggccgttctcgtcggcgtcggcaatctcgaccggcgtcggagggagtggggggaatgtcgccgtcatgtcgtcctccccgatgagcgacgacgaggctgggctcgcgggcgtccggtagagagcgaggaggctatcgcccggcattggcggcggaaagctcggcgtcagaggcgacggcgagtcgcacgtcgtgctcgagccgcccgaaaaacggctccgaaagctgctcgtcgaaggcgaggcgtctggccggccgcccgagatggacgacgatgacgaggcgcgggagttggtcaggggcggcggtaggataatagaccgcagccgggtcggcagatgcgaaatcggcggcgggcgaggaaagttgagggccgcgacatgctcgccgaggtccgagattgagcacgccggagagtgcgacggcaagactgcgacctgctctggccgcggcgacgggttggtgacgcgcagaggcaggatggtcggtagaacgagcggcgacgatgaagggctggcgagcgaaggaatgtcggcctcatcgcccgagctagacggctcgaccgacagcaccggcggtggagggagcggccggttcggtgcggtggcggcgacggccgcacccgagagcgctccgtcaaactcgtcgctctcgtggacggggctgatgtcggcctcccggagaaaggcgtcccagacgggctccagaggcgtgccgggtccgagtgttgagcccggcagcgactcgctgacgaccggcgagacgttgtaaagatcgacgaccgagctgaacgagcggtcgtagtcggcctcagttgccttcagctgagcctcgcactcggccgttggcgtcaccggggacgactcgagctcggcaaaggctggcctcggcgacgggttcatcgacgacttgcgcgacgacgtttcggctggcccggtgctcgcgcgcgtcggccggcgcgacgaagcgatcgaggccgaagggacaaagaacgagctcgaggtcgaggtgttggtcatggccgacgctgctgacggcgaccgggtgcgctgcgagatgagcgacgggtcgggcggcagcggtcgcgacgaagatcgaggccggctcggcagcggcttggacgaaagacgtgacggcggcttgaatggtgacagggcttctccgctggcaacgcggacagcgcccgatccgagctcgtgcgtcgactggatgggcgagacggttgtgtccggaaacgaccagtcgtagccggcgctcgacgagccgcggtgagggctctcgagcgtcggcgtctgaacagacgatgcctgagacgaatgggagggcgtgctgccagacgactgggatgagtagggcgtgtacgtcgtcgtctgcgacgtcggtcgggcggtagcctcaaaaaggaaggacggtctcgacgaggtggcccggctcgagtcgaacgggccgccggcatcgagatcggcctcaccgcggacgccgccgagctgcgagaccgtgaggtccatgatctcttcgagaccaccgtcgtcgtccgcctcgtagcgctggagcttgaccgccgcctcaggcgtgtcccagacgtgccgagcgacggcgccggccgcccgagggccatcctcgactgctgcgtcctcgtcgcccgagaagccccaggcggcctggtcggcggcggcgttgccgtggcagctgaaggagcttcccgagctgtggctcgtctggcttgtgctccggcgcaagcccaggccctgaatcatctgcgacgaggtcgggaaacccgtcttgttgttgttggaccggcgggccgacggccgctgaggtcgcgccggcttctttgttgacagccggcgtgcctcggtcgaggttgcttgcgctggcaccggtggcaggacaggtaaggcagccgaccgcgagctagacgacgtcgcgcggcggttgctaaagagacccatccgggagattgcaaggacgggctgcagaaacgggggcgaggcaaaagcaacaagcccggacgcatctcagccatcggggctaggaagcgggtgggctgaaggaaagccttccggaatcgggcttactaggcggcaacgcgagaggaggctggaggcggccgggtcggatattggttaacagcgagactacggacggaagagagtgcgagggagggaggttgagcgacagaacagccgaactagaggaagggcaaaggcagagtgcagggcgaccgagcagctggtcgcagcgggcgcggggcaaaagggcaaagggcacacgcggggcgcgtctggccggcggcccttgcagagagttccgccgcccagtctcaccgcccgaccattttattactcgcagacagggccaggccagaggcagaagggtgagtccctgctggcaagagagagcaatagctactgtcagtatgtagggagtcggcgagaggcgaccctctttggtcaacacgctgcgctgcgcctgcttccgacgacgctccttctgtcatggaacggttggcgggaccggccacgcgccggctccgacaaggtcgctccgctaagctggttcgcaagagtgacgagcagcagcagcaggagcagcagctgatgcgctgccatcgctgtcatcaaaaggcagacgagctggcaccgacctcggcagctctcttgcttggacaaccctttgctttccgcgcggatcggcaccttgctggccggcagcacggttggcttcggcatcggtacgtgtcagaacccaaatagaaccctggccatcgagtgtcgacgggttcagtctggactggcgctgccgcgcagcgacaccgccctccgagcgccggccgaagcgcgtccctccttgccacgacctcctcccactcgccgccgctctttcacttttcgagcagctcgcagcggtcgcctccgactgcactagtggctatgcccggcagcggcagcaacatcaaggttgtcgtccggtgcgtccctcccgagcctcgctgagcacgagctcgcgccttcccttcccgtgtcctcgcgctctggcgggcaacgcattgacctcatgctgacctcgcacctgctctaccctccctgacagatgtcggccgatgaacgctcgaggtgcgtagcctttcagggccgcagctgttggctcggaagggtccggcgcgatgggctcacagctgcgagctcgcacgagcctcctccctctgacgggctcaaagggagcagcatcagatcgtcgaccgaagctgacccagactgctgtctatcttgtgctctcagagctcgcccggggcgatcagccaatcatcagcatatcgggcaagacgacgacgattgagccgccgcccgagaccgctggctcgtcgtcccgtgcgaccgagcgcaagccgatgtccttctcgttcgaccacagctacgccagctatggatcaaagtcggacgccgactatgcttcgcaggacacgctctaccaggatcttggtcttggcctcctagagcacgcctttgctggcttcaatacctcgctctactgttacggccaaactgggtcgggcaagtcctactcgatggtgagcgccgccgcccgcccgccgtgggttgggttccgttgcgcgatctactggtgctgacctgatcccgcttcttccagctcggctacggcgccgacaagggactcatgccgctcgtacgcccgtctctcagccactcctctgctggcgcagaacactgacacgctccgcttcggcttgtccagatctgcgccgagctctttcgccgggccgaggcgcagcgggtcgcgcgcgaagggctgtactcgtacacggtggagacgtcctacatcgagatctacaatgagaaggtcaaggacctgctcaacccaaagaaccagaggtgcatcggcatcgctgtcagggtcgcgcaagtgtccgatgagctgacgccctcgcgcatactgcagcaacctcaaggttcgcgagcacccctcgctcgggccgtacgtcgaggacttgtcgaagctcgtcgtcggctcctttgacgacatcggtacgtctcgctctctacctcgttccgctcggctggcccgtactgaagcggcaatttcacccatgcagagcggctcatggacgacggcaacaaggccaggacaattgcggccacgcagatgaacgagacgtcgtcgcgctcgcacgccatcttcaccctgattttcacccagaagacgcatgacaacctgaccggcttggatgccgaaaaggtgtcgcgcatctcgtgcgtcgacgcggcttgctcctgctctgcgcgtccggcgatctgatcttcttggcttgccttcgccttctcagactcgtcgaccttgccggcagcgagcgcgccaactcaaccggcgccacaggtgctcggctcaaagaaggcgccaacatcaacaagagcctgacgagtgcgttcgacgggccactgctgttcctgccaaagctgaatgcgaccaacatttgggcagctctcggcaaggtcatcgccgccctcgctgcggcaagtgcagccgacccgcgcaaaaagaagaaggaggaccacgtcccctaccgcgactctgtgaggctccgccttcccttgctaactcgtttcggcgcccgctgaccttcctttcgatccaggtcctcacctggctcttacgggattgtctcggaggcaactcgcagacgacgatgatcgccgcgatcgcgccttcttccgcctcgtatgaggagacgctctcgaccctccgttatgcagacaagaccaagcagatcaaaacgcgaccagtcgtcaacgaggatccgacggcaaagatgatccgcgagctgaaggaggagctccagatgttgcgcagtgcgtcactgtctttgcgcgactcggccccggccctacgctgacagaccgtcggcccctttcgcagcgcgcgcgacgagcggcggaggcaccggcgctgaggccgtcttcgacccctcgattccgcccgagcagcagatggtcagctttctgtctgaggaaggcgaggtccggactatctccaaagctgtgctgcaggagcagatgcaaacctccgagaagctgctcaagagcgtcaacgagagctgggaggagaagatccagaagacggaggaggcacggtgcgttccgttgcccggggcgatacactgtcacccaaagaagctcacgccttggaccctcgacctcgcagcaaggagcgcgagcaggcactcgaggagctcggcatcaccgtcgaaaagggcggcgtcggcgtccacacgccaaaacgcatgccgcacctcgtcaacctcaacgaggacccgcttatgtctgagtgccttgtgagtctttccttgcctttggcagcggcctcaccatcactgaaagcgttctcgtatgctctcgtcggcaggtctaccagctcaagccaggcatcacgacggtcggcaacgcagatcggcctggctcagcggccacgatcaagctgtcaggcacccggattctcgccgagcattgccgctttgcgaacgagggcggcgcggtgacgatcgacgctgttgccgactcgatgactgtacgtctgctcgctccctcgcgtcgtctcttcgactgacctactctcggtttctcaacagatcgtcaacggcaagcgcgtcgtgccgggccagcctcatcgcttgcgatccggccaccgcgtcgttctcggcgactactacatcttccgcttccaagacccggaagccgcacgcaagcagcgcgacctggtcaagacgagcatgtcgcagagcgtgagcgcttccagtctggcttcgaccgccggccgaccagacagcccgagcgtcgtcgacgaaggtctcgtcgactggtcatacgcgcggcgcgagctcgctctcgctcgcctcaacggccaagatcctgcgctcgaccacctgcgggacgaggacctcgacaagctcttcgacgacgtgattccaggtcgcactcagggccatcagcagcaggatatcactgacgccgttatcgctcgcctcctgatgcagctgcagaaggttcggactctgcgcaagcgacccgagagccggctcagcctcggcgacgacatctggtcgcgacaccagtcgagcgacttcaccgacgacacgtcactcgaggcaaacgcgtcgaatccgtggggcgaggcggccgacgacagcccggccgacgatgatccagagctcgacgacctcagcgcgcgcctcgcgaagtaccaggctaacctgccggctgtcgaggccgccgactcggccatcgaaaaggctcagctcgagatcgcagtcgtagccatggcgcaggaggtcaagcgtctccagcaggagcgcgctcagggtgcgcacgctactcagcagcccgtcttcgtgccagaagcattcagcgcgcgggcaatacggctcgccagaatggtcatcgaccgctggaggaccaagaacacgctcgcgcttgccgagaaggtgagcttctctcacacgactagttgcgcggaccattctgacccgctctcccccacgccttcagatcctcaagacagccgtcctcgtcaaagaggccaatgtgctcagtcggcgtctgcacaaggatggtgtgtccggaatcgggacgtcctatatcgaaggaaagtaggaactgacctgcgtgtctcctccagtcgcctacaactttgtcgtcacggccggcgttgccacctccgccctgggagactttatcgacggggcagacgcgcacgcaccggctgctggacgaccagagctgcatatcaaggtcgtcgacgccggccgcaacaccgtcgtcctctggaccttcgaccagttcaagcagcgcctcgggcagatgcggaacctgctcgccctcgccgacaaaccgccgtgcgtcgcgcaagccttcgcccgttctcgccgtcgctgaccgagtcatgcgcgacccgcctattagagcattcgccaagcacttctcttcgatcgacgcctttagtgacggcaacgcgtctcccttctcgcatgtcgggagcgcggctttgcgtatcacgcccgtctttcgtcatgtcagcttcgcggtcacgagccccatcttctcgatctttacggcgtgcgtacttgtgcctgctctcagtccttccttcgctaacggatgtctgtttccctccctcgcagcgaggccatcggcagctgccggatcaccgtcacgatgacgtcgaagccggtgccgtcgcgcctgattggctcatttccgggctcggacgcagcttcgctctcgttgacgactgtcggaggacgctcgccgctcgacgttgttccggtcccgggggcgacgatgggcttcgtgctcaccgtcgacgaggtcaaggtggatcgccgacgtgctgtgccaagcttacacaattggtctgactgacgccgacttggttctttgcagggcctcactttgcacgactttgccgagcttcacctccagatccgcctttcgtcgctcgcagggttgtccgtcaacgaagaggtcttcccgtcaaatgtcgtcaagctcgagaagcaggcggcctcgcacctcgccttccgccgcacattctcgttcatcgccacgcccgagatcatctcgcacctgcggaccggctacgcccaggtcgaactctttgccaagtgccagccgacctacctcgaggggctcgttcgctgggacaccctgcgagagctcctcaactggccgtccggcccgacctcgaccaagcgacccgacctgatgcgccgagcctcgtcgagcttctcccaagaagagcagcatgacatcgcactgcggttgcaggttctcgagctcgatgcggccggcaagtggacgagcgtgcctgtccagtcacagggacctttggatcccgggtccttctttgtccagcagggccttcagcggcgccttcgcttttcgcttctccacggctcgggcaaggccttgcgctgggtcaacctctcacgcgctaccgtcggccagattcggttcgtcggcaagggaacggcgcctgttgctgaagaggctgccgagcttgacctgcgcatcctgcccgcgtccgaggtcgaaccgccggtcgtcgtgcacccggacggaacgtcgacgctcacagccgaagccctttgggactcatctgcccacgactcggcgtctctcaaccggccctcggcatccggccagcgcgtgctgcttcgattgacggtcctcgtccagatcgacaatgccgagcggccagcgacctttacgcacgacgtttccctcaagatcctcgcgcgcggcgccggtggcccgggctcctttctcaacagcctctggggacagacgcggctagtcaaacagacgacggcactcttctcgcttgtcctctcgccgtcgccaatccggtctgcggccgacctctggcggctcgatacctcccagaccttcgtccctggcgagaaggcgctccctcccgactggcatgtccgaggcgtctcggccgtcaaagactacctcaagctccagcggatcgagcgactctctgccgacgtccgcgcggtggaggctctcagcgccgcttgccaccggtcggcctcctcgcctcagatcggaccggagaatcgcgaccctgtcgacctcaagcgcaagatcgtcgaactttggtcaaggccctcgggcgcagcagtcgagtcggtcctgacgcgctcgacggcgccgacctcgaccctcctcgccggtctggtcgacctcagccccaagctcgtcccgtcggtcacgctctctcaacggagcgccgtcgtcgccaaaaagaagggttggctgcacgtcctcgtcgacgcgcccggcaacgtctgggtcaagcgcttctgcgtcctgcgacggccctacctccacctctacctctcgagcgccgaggcggacgaggtgacgatcatcaacctgacgagcgaccgatcgaccggcggcgtcgatctgacggtcgtctcgagcccagaggtcgagcatctgctcggcgtgagtcgtccctctcgcgacttcgaccagagcttccgactgaccctctgccgtgggtgttctctccccagcgccctcatgccttcacttgctactcgcgacgaagttcgcacgtgtttgccgcgaccagcgcgaaagacgagctcgcctggcgccagactttcgcacccaatacctcaacctagaccgactcccggactctgcccttcacgaccaggatgcccctacccgcccgacctgacacctagaccgcatcgatacccgccctggcctcaacgagctacccttctttcacgattacccttcacgtagaggcctttctacacgacccgagacgatcctcatgaccccccctgctctgctgcccggagaacgcgcgtctcggtttaagcgggtgactacaggtagacttttattgatgccgacccgacttcgcaacacgcggcgcccgatctttcagcccccttccctccgaccacatccctctttcctgcccttcctccctacatctctcagccacagcaaagatgaccgccgtccctgccgccttcgctcttcttcccaaggactatgcttggaccgccttggccgcgtcttcgacctgtgcgttcctcttcctacccgcgcatcaactcgtcgcgtctcgactgccagctcacgccctgccggaaccatgtactgctttcctctccgctgtcgctgctcctccgttctcaagtcttcctccatctctaccagatcctggaggtgtccaaggcccgcaaggccgccaagattccctaccctcagcgtacgtagccgttcgtgcgagatcgacccctcaaggatcatcccccccaaggatcagcctgttaacgctgccttgcctatcttttccttgaaccagtttacgccgaggtcgctgagatggagaagtcgaaggagtgccgcaagttcaactgcgcccagcgggcccatgcgaacgtacgtgaatagctcgacgtgttcacgacgattcgaggctgatcttgtccgcctcccctattcgcccgcgccctcctctttcacctctgtcatcgccttccccctactctgacgcccaacaaagaccctcgagatcgctccctacatgctcgctggtatcctcttcaacggcatcgccttcccccgcgcgtcggctgccctcggcgccgcctgggttgtcggccgcatcctctacacctacggctacgtcactggcgagccgcaggcccgctacaagtttggcggcatgctgcaccttatcggctgggtcggcacgtggttcttgtcgacctacatctcggtcctcggcgtttgggccctgctttagaaaccccacactcgtcgctagccggacctgcgatgcatggagccctacaccccagttggacgtgtcgtcttgaggcgtcatatatcgtgaggagcgtgagtgaggtagccggcgtgaaagggagagagcgagaagggaggaaggggggccgtcactttcggcgccgtgcctcgagactggccagcgcagcacgaacgctctcgagcgtcggcgctggacccgcaactggcttggaacccgcagtggcggtcggtgcacggatgccggatgcgagtgacgacgtctggcgaggaagccggctacccgccagcacggtaggcgccgcagccaccgacgacgacgacgcgctgcccggcagggcgtagagcgaccgcgaatgcaggcgagacgagctgacgcgttcagagagcgcggagagggaagagttgcttgtgcttgagagggacgagttgagcgagcgcgtgccgtccttccgattgagcgtcttggcgggagagggcgcgagtttgacgtcgacctccggctgggttggtgcagcgttcaccgtcgagttgaggccaacgaggggcgtacgtccagctgcaatgggcgtccgcgcgtttgcaaaggccgcgttgagccgggcggcactggccgagcgaaggagaggggtcgagttgaccggcacggacgaggtgcggcgatgccgagcctgagatggcgtcgcgctggcggcaggcggaggcgctggaggacggacgacagacggacgagccgaacgagttgctcccggcgtcgcatgagcgtcgcggcctgtggtgttaggcgcagtcgacggcggggcagggataccagagagtcgccgctgggccgtgtttatgggcgcaggggcctggaccgtcctgcgcggcgtgagcgagccgatagtcgacgtgcgtcgtagggacgtagaggtttgctcgccggcacgattgactgagaggtctttgccagctagtgaggggggccgtcgatggacggcgctggtcgccacggagggcgtcggcgcgtccttggtaagggatgcccgcggtgccaggggcgagccggcggatgaagcccggtgcatggccgagctggacgaggtagccactggaagaagctcgcgaagggcaggccgagcggatgctgcagggatcggcgagcctgcatgaggacgatcagcaccttaatcgagacgcctatgagcaatgaggctcactctcagatgaggcggccaagggcacggctgccttgatttgtttgacttttgagacgggtgtcgaaagcgctggcaggcggctgacaagtgcgacgacgattagcactgaacgaggcggtcagatgtgggtcggaaagatgcacctgtctgcggccatgagagtctggatctcgcgctcctcctcgagcccccagtcatccgcctcgtcgtcatcgtctccgagcccggtcggccgagatcccgagagcagcgagaagctctcgtcctggaggtcaaacgccttcgaactcaggatgagcgtctcgtcgccgtcttcctcggtcaacgccggcgacggtgccgacaggggcgtcggtgacgcagaagatgagcgaggaaagttgctcgtccgagactgcgcgagagaaggcaagggcgtcgaaagaaggtcaaaagtctcgtcgcccatgctgacgcccttgagtgcgccgaggtcgaaggactcgtcgtcgttgtcgacggccacgtcggcaggcccttgcatacggtcggcagcgaccggtgtacgaggggcgcctcgcgtcgaggccaggaggtagccgaagcgtgcctcgagcgacgccgagtctcgaggaggctccgttgagggcggagggctggtcagagccggtgctgagggaggcgacaccgagagcgtcttgacgcgccgaggcgccggggtcgtcatcaaatcatcgtacgtctcgtctgcgccgacgttggccggccagaagcccgtctggtcaagctcgtctcggtcagtaacgtttgtcgtggtcctgttcaacgagacagtcgaggtcgaggatgcgcttgaggccgtactcgctccgaggtcggccatcgccggcggggaggggaacgtgctggcatcagggccgagcttctggacccggcggggggctggagtcgtcatcaggttgttgaatgactcgtcgaggtcggccggaatgtgagggaggaccgtcgttccgtcctgcgtctctgcgggcctagcgtgattgccgttgacggttgacgagacggacgacgttagcgagggaaagaccgagacgtccgcggccgaaaagactttgacacgctgcggtgccggcgtcgccatgagatcgtcgtacgacgcgtccatggcaggtaggaacgtcgtctcctcggcatcggcgaggccagcgctgccagcgcggccagcggcgaccgtcgacgtcgagctggtagacgacgcgaacgacgtatcggccgaaaaagccgaagtgtcggcggcgagcgcgaaggtccggacctgtcgcggcgccggtgtcgagagcaggtcggcgtacgactcgtcggcgaggttgcccgtggccggcaggaacgttgtcgtctcgagcatgctcgagtcagccaatggtgctgaggctggcgctgctgaccggcttgtcgacggcgcaaacgcggctggaagggacgggaacgtcgactcgtccgctgccgctgctgctggccgagcgaatgcaaagttgcggaccttcttgggcgccggcgtccgcatcaggtcgtcatcggcttcgtcgtcctcccagttcggagccgacgggaggacagtagtctgatctagtgggcttgacttcagctgaggccggtggttcagcgcaggcagttgcccgagcgggccatcacatgacaatgtcgaggaagaggtcggcgagacaaacgccgtgacgttggccgaggcaacgaaggcgcgaggcttgcgcggtgctggcgtctggagcagatcctcgtacgactcgtcgatctcgaacggtgcgagcgtcgctgcggtgttgtcggccgagagttgcggaggcgccggcgacgaggcgaagtcgtcgtctgcggcggcgcgccgggcgactgcgcttgggctggcgacgacgcgccgggtcggcatgggcgtctcagccagccagtccatgacattctggcggcgaggcgggctttcgggcaacggtacgcgccgagcttgcgcgagcaaggtcgacgtcgccatgagcttggacgtcggccgaggggtcggtgcgaggaagtcgaatgacgagggcgagctcggaggcggcgaggcaggcagcggcactttggcagccaggcccccaaagtcagagctacctgctgctgacggctgagacgagctgctgggcttcaccggcgactcccatgacatgaggtcgaccgccggccgatcgtgctcgcttgcggcagccgtcgtatgtgttgccgctgggcgctcgggcgaggtcgcgacgagctcgccgacgaggctgccgccttcgatcgggaagcccttggcgtcaccgagggccgagaagaacgactcgttgtcgtcaaattcgtcgtcgtcgtgctcggcgagggtgctgaggccggtcggcggcccaggcttggtcggcgagggtgcagagagcgggtcgaagagcacgctgcgaggcggaaaggtgacagatcggagtcagctctggcacgtcgaccggaagagaagttagccccgctactcacagcgttggcctcgatcggcgtcggccagtttgcgactggtccatcgtgagcggaggtcgtgttggccgatcctggagcgagcggaccacaagggcagtcgcgtggcgcgtcgctcaatgcatttacaagtcagacgaatcaattcaagagggcgccttacctttagcaccgcagcccggccagcgcacccccggtcccgacgaccgacgacgacgacccgccatcgctccttccctctaccttcctctcgcagtcgctttcaggaatgaagctgctccatttcctgctgctcgcagtcgcctgcttgagcgccgtctatgcgtgagtcccaatgagctcgagcaacgcgctccctcacttgcactctccgccgacgacctcgcgactgatgctcgcgttccgccctggctttctcgccacgcctctcgaaaacagctgggacaaggagtgcgtccggccctgctctgcaagctacgctctgggttcgtgtcggctttcgctgattcactgacgctcgaccctgaccctccagggaccacgagatttttgaccaggtcgccgcgctcgagaaggccgagggtccgtcgtccatgcttaagaggcggcccagagagcgacggcgctgattcacggccctcttattcccgacaggcaagggcacgaccttctactctttccttgatgtgccctcgaccgcgtcgaccaagcagatcgacaaggctttcaagaaggcatcaatgcagtaccagtgcgcaccctgccgttcgcttgacgagacgagacgagtcggcctgacgctgtattactttcattaccagccctgacaaaacgcggtcggccaagaaccgggacgtgcttgacgcaaagtacgctcggatgagcgtcattgctggcatcctccgccgcgaggaggaccgcaagcggtacgacgtgcgtctcggccagcttgattagcgcaagcctgcagcatcaggctgaccatcgatttcgtcctgctcttccagttcttctacaagaacggcgttcccaagtggaagggtccgtcatccgtcgctctcgttctctgccgcgagctgcacgctaacgtccctgccccgcaaacgcaggcaccggctacttctactcgcgatggcggcccggattcggcaccgtcgttgtcttcctcgctcttctgacggccgccttccagctgctcttccagacgctcaaccatcggcgcgacgtcgaccggctctcggccgttcttgcgagcgcgactaaggcggctgcgagcgtcggtccgggccgcgagggccggcggaaggtcaagattgaggtcgggggcgcgatccgcgagtgtgccgtcgacgccgacggcgaggtctatcttgtgcgtcctgcttgccatcgcagcatcgcgacacgactgatgcctcagcccacctccagctcgacccggcgcacgagccctaccacctctcgctcgagtcgctcccggccccgtcagtccgctcgacttggcttgtccttctcggccagagcctgctcgccaaggccggcctcggcgcgcagcacgccgtcgaacaggctgaggaggtcgtcgaggaggtccaggaggaggccgcgaaggccagcggccgagctaagaaggaggccgctcgtcggcgctagatggggcggaaggggaagtgcgggcgtagattggctcagcaattgaacgactgcaagaaactatttgcacgactcatttgcagaaatgggagtcttcgaccgggtgacgcgaaggagagacttgtcggaaggagggccgtcggagggcgccctcctggaacgcgcgtcgcctgctctcgatttgcagatgggtcctcagcaaccttccgtggagcagagtgagagatgcgtcgacgttgttcttgggacggctgacacagcagaggcgcgtgcgcgtgggcccagaggtggagggcgtccgtgacgcattgcctcgagacgaaagaggctcgccaatcgcaccttcaccctctctcttcctcctctacgcacgactccgtcacacgacactctctctttctcagccatgccctcgtccgacccgcccacaagcgtcttcatcaccggctcgtccggctacatcggcggcgcgatcctcgcccgcctgctccagacgtacccctcggccgacttctttgtccagtaccggcaagacagccaggagagcgagctcaagagcttctcgaagcggatcaagccggtcaagggtgcgtttgggcatggcggagctttgctttgagctcaaggagctcttagctcaaagagggtcgctgacgagctcatgctccttcctgcccatcgacccaacctccgcagcatccctctcggatcatgcgatcctcgaggagtattcggccaaggctgacgtcggtcagtcgggccagcctgatcctgaatctcgggttatagcgctgacctgcgcatcttgctctgcgtggccgccagtcatcaccgccgccgactgcgacgacctcgaggcggccaaggccgttatcaagggtctcgaatcggccgcccagggccggctcgacaacaagcagcgcaaggccgtcctcatccacacgtcgggcaccggcgtcctttgcgacccggatgtgcctgctggcgagctcgacccgaccgaggtccatgatggcgatgccaagcagatcgcagcaatccccgagtcgcggccgcaccgcgaggtcgacatcgtgtgggtctcgcccccaacgcctctgtcccgtcaatcccttgctgaccctccaacctgtcttgcctcacctctcagcgtcaccgacgccttcaagcgcggccactttcttggctacattgtcctgccttcgaccattttcggccgcggcagtgcgtcgagttgctgcgccctcgtccattcgttttaccttactgacatcgcctcggttcccttcgccagacggaccgatccacagtgcgttgacctcggcagacttgctgacattgcgcagatcactaatgtctggcgtattgctctcgccacagccacgtcgcagcagatccctaacgccgtcaactgggcgctctcgcaccagcgtgcgacctacgtcgagcctggaagtacgttgaccggtcgccacgtgaagcagcgccgactgcgcaccttcgattgacccgcttgcccctcgtccgcagagaacctgtgggcgtacgtggaaatcggcgccctcgccgacctgtatctcaagctgacgcagctcctgctgtcggccgaggcgcccccgccgccgcacgacccgtggacgcactacatctttgcggcgacggccaagcagcactcttggaaggagctcgtcaccaaggtcggcgacattctcaaggctctcggcgagctcgaggagggcggcgctcagggcatcgatgccaagtgcgtcctgctaccgctgagaccacattttgctttgccttgctgatcaccctacctctctgctcctcgcagggactacaagggtccgctgatgggctacgcgaagcgcgatggcgctctccagacgaccaactcgcgggcgatcgccgaacgggccaaggagctcgtcggctgggaggacaccgccgacgtctatgcctacctcgagggcgacatcaaggatgcaattaaagcgtggaaggcgtcggcgtagagattgagcgtgctttgtcgactacatccatgcttccctttcgcgaaattctcgacgaggagaggtgcatcaagatttggcaagattaaccgtcccagccccgccctctggaacaggcggccgctcgatcgggggccagctaccgtcgttccaggcgttgatgcagccgttgaggctgccctctttgaagacagggtcgccggcgagcagaatggtgacgtcgccgagcccttcgggatgtttgatgaccaagtgttccacgaggttgccccggacgtgggcgaggacggtcaggagcgcccacttgagctgctccgcgtatggcatcttggcgatgtcggcgatgattcagggcccaaatatgagcctcttgaacacaggaggctcgccagtgacagtgctacagatgactctcaagatgctgtcggccgagattgtgtcaaggccgggctcaaacgcagtcttaatcgttaagtcgagccggccgtcggcttgggccggccactcgtccggacagaagtgactgggcggaacggtgagggtgagggtggagattccccgcgacattgatggcgactttgccagcgctcgctggagagccttaagaaagctgtggatggccgtgtgctgggtgtcgttttggagagggacggcatagagcttgggtcattggccgagcatcaaaacgagctgtctgccaccctctgagatgagaacctcggtagatctgtcgaagtcgtcgaaatccggcgaatactggctcgtgctcgtaagcgtctctagccgaaggcggaaggcccttggggtgtcccgcgccgcgcagacgccgaccagtcggttgaggaagccgacctcgaggtcgacctcgttgatgccgagatggagctcgcggatgccaaacccggcgcgcctcttgggcgaggagagctcgagtgtccgaaggaacagcgaccgatggcgagcgcgagtattcccgccagagagctcgacgacgttgtagagcttcgggacgaggtgactgtagacgatcttgttgacgcgcaagacgaccgggttccggacgttaacttggtcaggaccattgccagcagctcggggagatgcatcgggttgagcctctgaaggtacgcaggtggtcgggagtgatcagcgacaagcgcagcaaggcagagggcggccatccgcacgtaccgaacgtgccgtcggtttctcagcagcgacggccgcctccgcaggataccccagctttggattgccctcagtttcgcgaaggcgagcgtaggatcagcgaagagcaggcgggcagtagagttagcgaatgtcaagcgccgaagggactagcggaggagacgcacctcggagggcaggtcgacgccgacgccggaagtcgccggctctacgcctggctgagacgagctggcaacctggccggcggcggatttcgaccagactcgagcatgctgcttgtgctgtctgctaactgccgagacgggtgtcggacgtcggaactcaacatgcaacagcgcgggacggtcgggaaggcggcaagctgatcgggggcaaagcgtctgcgtccggcctggccctctcatcaagtccctcctcgccttctcctcccatcgcctacctacaagctctttaccctgcccagttcctccaggatgtcccgtgccgggccgtcgaggcttcctttcgtctctctacggcggaccagtctcgtcggcggcagcagcgatggaggcagcagcagcagcagcagcagcagcagccgagcaggatggctgccggcgacgacggcaccagctcggccaaaatcatcaccagcagcgccgcccgtgcacctcggtcctcgaccgtcttcgccttctagagcacgagcatcgagctcggagcaagcgagatcgtctgtcaaagcgaaatcagactgggcttggctcacgagagccccgggcgctagccggcagcctctgctgcgcccatcggccacccctccgagctcgtccaggcatgccttcgtgatgccgcctttgtcgtactcctggcctgcttacatgcagcggcggacgctcgccgaccggtcaacgcagcatcaccagcatcggccagcagtatcgagcacggcctccgagagcgacggctcgcccgacctgcctcctccgcctcccgagacgccgggccctccgccggcgcctccctctgacggcacgaccaccacgagctcctcgaccaagacgacggccccgccggtgacggtcatctcacacacctcgccgccgcctcatccgcatacgatacgggcctcgttgctgtcgacgtacccgcgctcgctcgcccggctcggcgcgctcctgccgtcgacgcccttcgcactcgatccgcaccaccggccgtctaaggccgacctcctccggctgaccgacagcgcctgggagcgggcccgaatccgctggaagtggctgacgattcgaggcttccgccggttcaacgtcgacgactggggcgccgtcttcagctgggtgctcgtcggcaacatcggctggctcgtcctcggcaccggcagcttctttggcatggtcctgttgacggcgaatacgttctcgctccagggtgcgtcctgcgcgcagaaagctcctgatgaggtgctgacggccctttcttatcacgcagacatcatcgcgaagcggctctccgactactttacctcgggctcgggcatcaccgtcatctttgaatcggcgctcgtcccaaagctgtttgcgtcgacgatcatgctcaacaacgtctacgtctcacgccgacctgcggatgcgcgcgtgccgagtctgttcggcgacgcgagctcgccgctcgaaggccaggccggcgcgaccgccgccgacggcttcaagtttgggccggaggatcaccgcgagcattcgtttgcggcctcggacgacggcgccatcgaggacgacggcaactacacccagtttgacctgaatatcgactgcatcgaggtcgagctcagtttcgtccgctggctcaatggcgagggcctcatcaagtcggccgtcgtctccggtgttcgaggcgtgctcggttcgttcgtctgagatgcctccctgcagcgctgccagacctaactcatgcctcttctcgccgccttcagaccgccggtctgtccattgggacccatcgaacccgtggatcccgcacgagtggcggcacccggcctcgcccggcgatggctcgttctcgctcaccaagctcgtcgtcgaggacatgctctgcaccgtctaccagccgggcggcttccggccgttcaacatctcggtcttcaaggccgagctcggcaagttccgcaagaagtgggctttctacgacttcctggtcagtcttctctcctttctttgtgaccgccacccgctgacttcctcgaccgccgcgcagaatgccgagggcgtcaccggccagtacgacggctgcctcgtcagcttgcacaaaccccagcgaattggcaagacggtcggcgaggacctcaaggacggctcgtgcgagcgcatggtgcggctttctctcccgattgctcgatgttgcgtcgagcagaggctgacacgcactctcttcgcattcaggcccgcctgcgagtcgatggcctcccgatcgatcacatgcagggcgcagcctcgaccgggccgctcgcctggatcacctccggcaagctcgacggcgtcatcgacgtctccttcccgcgccacccggacgacgacgcggttgacctccagtcgatcgtctccgagatcattgacaacgtccaggagatcaattcggccagtcggggcgaggcgacacgcgagagcatcaaccctggccaacggccgctcgccaaggctccgctgacggcgcctgccggacggcctgctggaacgaagactgggcgcgaagtcgtcgtcgatgtcgaccttcgtttccgggacctcaaggccgccgtgccctacaagccagacgagctcagctacgtcaattcggccctgatccggccgatcgttgccttcatcaagtgggtgctttcgatacctcgtcgtgctgttctttcggctgacagccttgtccgtcttgttaccctagcgccaatcgaacgcttctgccgatccagtgccgcgtcgtctctgatctgtctgagttcgacggctcttggacgccttgggagggtgcgtttgccccatcgcgctcgaagtcctcctcctcgactgacgcgtcgtccctcgccctcaccctccagccggcctgctcgacgctacgtccgaccaggtgtacgccgctctcgcccatcacgtcacctcgcacgacatgaacaaccagcggctcaagcaggtcggcgtctggagtttgcagctcgcggccgagctcgccgtcggaaccgtccgcaaggtcctcctccagcgtaaggacctcggcctcggcgactggggcgtcggcctcgctttctagcggttgacgggagcggacgggaggctcgaggaagccacagcgggagaggagaaggagggtctaagggaccctcgcagattacgaccctaacgaacgaacgcaatcatgtccctttccttttgcttttctgccgagcgacgagcgattgaccgggtgcaagggggtggccgcggattcggaaggtgtcggtcgacgagctgcgcgcgacgttgcacttgagcctaggatgcctgccgcaactgcctctcctccgtactaaaatccgtactaaaagctgttcctgagagacagaggacggcttcggattcctgctctaccttttcctagactcacgcttccagggcattcatcaattgcggtcaagatgagtccagcggtcgaccgtcgctgcgccggtctctccggcggagtgtcggctcgagttcgagccagcagctcaacctaacgccgaaccacacctccctttccgccgcctcccctcccctccagccctctctccgcagatgttcaagaagcgcacgaggccggcctcggtccgcgagaagacggacgcaccctcgctgccgaacccggacgatctgtcggcggcgagcgcatctgaggaggcggggccgtcgtcggcagcggccgagtcgtcgacagcatccggttcgacagctccggccgccggcggagaggaggagcctcaggtcgggtgcgttcaggctcctttcttcggcggacaggtcttgtgaggagctgaagggcgagcaggaggcacctacaagcccaggcgttggagcggtcgggcgagctcgccagccggtcgcgaagccatccttcaatgagctgacccttgccgtcgtctctcgctccagatcaacgatccaggagatgctctcgcttcgccgcttccgagcccaatcatcgggcctctcgctcgacaagctcaaccggggtgaggtccggcggcgaaaggcgaagacggccgctgcgagcggcgagggcggcgaggagggcgaagagggtgaggaggacggcgaggaggacggccagccaaaggtcgtcgcgggactcgtccagggcaagggatctaagccggtagaagacgagtgcgtcactcccttcttcttgagtctgtcgggccggccgccggatgttgcgccgaccgccgaccgcccgctcgcagcaccggcacgaacacgagacgatgcactttgctcgtccagatctaacctttttggtgcttgctgtctaccaggaacccggacgacccgcaggcgcggatgaagcggctcatgaacgcctcgaactttacgcagcagacaaatgcgctcgacgtcgacaagcacatgtgcgtctccgccctgcagactcgtcctgaaccaatccaactgacgcctgctatcacactactgcaggatggcctacattgagtctgagctcctcaagcggcgcggcggtgtgccgacggttgccgagctcgcccagcagaagccgcacgacccttacgaggagctctatgcgatcgccgacgagtacaaggtcgccaagggcggcaagacggagaaggagatggaggagcgcgaggagaagggcgacgtcatggcgagcatggccatgctctcggccagtgcgtgcctttcccctcacaagggggtgctttgcttgccgtgctgacctccgctgccacccttgctcacctctagttcccgaggtcgacctcggtatggacacccgactcaaaaacatcgagtcgaccgaaaaggctaagcgggcgatgctcgaggcccgcaagaacgcacctaagccgatgacggacgccgagcacgactttgccgctgcgcgctgtgcgtccctcctcgttggccgaggataccttgctcacgttgactgacacgctcgctgctgctgccccttgacagtctaccggccaacgcatcacgtccagtccgattcagacgcgctcgtcaacgcccagcgggcagcggccggcctcccgcccgtcgagcccaagcggtcgtcgggcggcggcggcagcggcggcagcggtggcggcggcaggaggaaggacacggcgaccgacgaggtcgtcatggagcgctttaagaagcggatccgcaagatgtagggctgctcttctctttgtagcgcatgactcctctcgtgtacgacttatgggcgaacgttgtcgcctcacctgcgggtagccgacctctcgctctccttcactcacgataatagaggccctgaagaaagcacatgcgaaaggaccctctcgcgagccccttgtctagtcgtccttgccagctggcgcggttcggttcggttgccgctctggctgcctccggccggtcgggccggtcgccgtcccgccggtcggcccgcgccgacgcctcaagaggaagcgcagctcgcgctctcgtccgtctctcccaacctcaacctgctctcatctttccacaatgtcgtcctcatcagcagcagcacgggtcgtcatcgtcacaggcgcatcttccggtccgtcttctctcctcctcctccagcccaacatttcacgtcgtcctcgtaggccgccgccaagccgagctcgacgagacggcccgactgtgcgagtgtcagccgggggggacgcctaagcgtggagaaggagggagagggggggagagcgcaccgtccggcgtctcctcctcggttgggatgccaacacagttgccgtgctgccagacgttgcacgtgtcgcactggatcatcatgtcgtccgactctgtgggtgcggcgcacaggaggacgaagccgagggagaggttagtcgagctgatggaagggggtgaaggagaaggcgaggtcgcccgcgcgtgcggggccggcgcgtcgagcggcgagcttcggtcacgcgagctcatgggaacggaaagcgacgagaaggaagagaaagaaagagaaagaaagggtccgcaccagtgatgccgcagacgcagcgcgtaatctccgcctcctcggctgagctcgacccttcctcgtcgtcatcgtcgtcgtcgtcgctctccggcgtcagctccggcttgacgtgctttcccccggcgacgccgccgccaccgctgccactcgcgcccgtccgaagggcctcctgtggcggctcgaccttgacagccggtggtgccggtgggggcttgggcgatgcgccggccgccggtgtcgtcgtcgtcgtgctcgtcgaggctggctcggtcagggggctcgtgtcggtcgcgtccaccatgccagcaacccccgcaggtgccgatggcccatcctcctcctcgtctcctacaaggccgccagtagcagcagcagtagcaccgcggtcgccgccgccggtcgccagctccatcttctcggcctgttgctcgccggtcgactttgtccgtcggcggcgggcgcccgacgtcaggccgtgcaagctctgggtataaagcgcatgagccagggcgtttgccgactggggtgagcccgtgctttgggccgttgtgggcaagggcaggagggagggcgcggaagtagggttgggcgtcgaccgggtcgaggtcggcgggttcgaggcggccgagggcggaagcgacggccgcgaccgagtcgagcgcgggacggtagggggcgaggctgagtaagagcggttagtatgacgtcagagagggagagggcgagcaagaggacggacccatgccggcagtgcagagtgagggatggagggaaggagagagccggcgcaagatgccgtccgtcgccgggcgatcgagcggttcggaggcagaattcccgcgttttgacaggaacctgccccgacgctcctgctctcgtcgccctccctctcacccagccagccaactctcgccatgtcgccgccggtcgcctcgtcctcggccctgacaccgtcaacgtcgtcctcggcaagacacacgttccacaccctctcgcgcgaggcccgcttccgctttccgcccgcagagggctcggacgtgccctcgctcgacgagctcgtcaagccccacatcgactcgttcaatgccctcctcgaggacccggcgagcgaggcctcgggtggcggcggcctgctcggcttggccgtgagggatatcaccgagaaggtcgtctttgactcggtcgagaatgcgacaggcaaccggctgagcagtacgtcgacgtctgcgccccccggctggcccggcctggctgcgaagcttcgctctcaaaccccaagagactgacctccctggctcccggctcccgcgcacagttcgcatcgccgacgtctcgctctcgcgtccgctcgtgcctgacaaggacaagctcgcaaaggagcgccgcgtctacccggccgaggcccgcgagcgcatggcaacctataagtcgaagatgacggcgcggattgtctggagcgtcaatggcggcgacgagcatgaggagattcgcgagctcggccagctgccgatcatggtcaaggtgcgtggcacgtcccccggtcgggaggggcttcatctgtgttctgacccgccgcacgccttctcttgcgcgccgctgtcgcccagtcgaaccggtgcaacctcaagggagcctcagcccagacgctcgtcgcccacggcgaagagtcgtcgtcgtttggcggttactttgtcgtcaacggcaacgaaaagctcatccgcttcctcatcctcccgcgccggcaccacgtcatctcgctcctccggccgtcgtttgccaagcgcggtcccggctacacgccgtttggcacgcagatccgctgtgtccggccggatcagacgtctgtcaccaacacgatgcactacctctcgaccggcggggcgacgctccgctttgcctggcggaagaacgagtacatgatcccgctcatgctcgtcctcaaggcgctcgtcgacgcgtccgacctcgagattttcgaggggctcgtccagggcgaggaggacaacacgttcctgacggaccgggtcgagctccttctccggggcttcaaggcgtacggcctccagacgggcaagcagtgcctcgcctacctcggcgggaagttccgcatcgtcctcggcgtcccggaggactgggccgacgagcgcgtcgggagctggcttatcgagcgcgtcgtcctcgtccacctgccgagcccgcgcgacaagttccgcatgctcctgtccgtcccgatcgttcccctcggctctcgtcgtcgtcgccgtcgtcgtcagcttggtcctgacgctgtttccctcttttgctcctaggttcatgctccgcaagctttactcgctcgtctcaaacgcgtcgtgcgccgataaccctgactcgccgcagcaccaagaagtcctcctcccgggcttcctgtacggcatgatcatcaaggagaagctcgacgaggcgatcggtgccgttgccgcccagatcaggcaggacgtccggcgcaatgtcgccggcgtcgacttcgccgacaaccgctacgtctcgaaagtgatccacaagatcaactttgacgtcggccacaagatgagctactttctcgcgacgggcaacctcgtctcgccgacggggctcgacctccagcagacgtcgggctacacgatcgtcgccgaaaagctcaacttttatcgctacctcgcccacttccggtgcatccaccgcggagcgttcttcgccgagctcaaaacgacgacagtccggaagctcctgcccgaggcctggggcttcctctgcccggtccacacgcccgacggctcgccctgcggccttctcaaccacctttcgcatacgtgcgagattgtcacatccccgcttcccgcagggcacatcccctcgctcctctcgtcgctcggcatgacgcaggcgtttgcgtcgacgacggtcgacggccgggccaatctcgtcgtccagctcgacggtcgcatcgttggcttcgcctcgccggcgctctgcgagcggctgagctttgcgctccggctctggaagaccgagggacggcacgacgtcccgctcgacctcgagattggctttgtcccgccctccaagggcggccagtaccccggcctcttcctcttctccggccgggcgcggatgatgcggccggtgcgcttccttgagaacggcgaaaccgaccacgtcgggacgtttgagcaggtctacatggagatcgcttgcgtcgacggggaactcgagcggctgccgccgttcaagggcaaggatcgcggctggcgccagagccacgtcgagctcgacccgacctcgatcctctcggttattgccaacatgacgcccttctcagactttaaccagtcgccacgcaacatgtaccaggtgcggcccccctcccccctcagctcctcctcctctggcttgtttcgtcaagctgacgccctttcttcttgcccgtccacagtgccagatgggcaagcagacgatgggcacgccttcgacggccatctcgaagcggaccgacaacaagatgtaccggatccagaacccgcagacgccgattgtccggcccgagcttcacaacaagtatggctttgacctcttcccgaacggaaccaacgccgtcgtcgccgtcatctcgtacaccggctacgacatggaggacgccatgatcctcaacaagagcgcccacgagcgtggctttggctacggcaccgtctacaaggcgcagatcatcgacctcaagggcggccgtggctcgacctcggccgccgccgtcgaccactttggcctcgggccggacgtcaaggccgacaacaagctccgcgacacggtcgacgacgacggctacccgctcgtcggcatccggctcacgcccggctgcccgatcgccgcccacgtcagcgacgcgaccggccggaccgtcacgcacaagtacaagggcgacgaggtcgcttacgtcgaggaggtccgcgtcctcggctcggacgctggcgatgccgaggcccaaaagattcacatcaagctccggatcccgcggagcccgacgatcggcgacaagttttcctcgcggcacggccagaagggcgtctgctcgcaaaagtggccggcggtcgacatgccgttctccgagagcggcatgcagcccgacgtcatcatcaacccgcacgcgttcccgtcacggatgacgatcggcatgctgatcgagtcgatggccggcaagtcgggcgcgatgcacggccttgcccaagacggcacgccattcaagtgcgtcacgctccttcgttctgaccaattggctcctgagctgatctgactcgcccgcctttgcaggttctcggacgacgacacgccggtcgagtactttggcgagcagctcgttgccgccggctacaactaccacggcaacgagcccatgtactctggcgtcaccggcgagcagtttacggccgacatctacctcggcctcgtctactaccagcggctgcggcacatggtcaacgacaagttccaggtccggacgaccggcccggtcgatccgctcacgcgccagccggtcaagggccgcaagcgctcgggcggcatccggttcggcgagatggagcgcgacgccctgctcgcccacgggacgtcgttcctcctccaggaccggctgatgaactgctccgactacacgacggcctgggtctgccggacgtgcggctcaatgatctcgctcggctacgacctcgactcggtcgacatgtcgggcggcgagcactgccgcgtctgccggcaggagggcgccgacgcaaagggctccgaggacctccggctccaggtgcccaagaacaacctcgtcatgggcggtatcggcccgggcaacgacatggacgtcattgccgtgccctgtgcgtctttgacccccttcgattcgtcgtgtctacgaccgcttgctgacccctcgtcctccgctatccagacgtcttccggtactttgccgccgagatggcctgcatgggcatcaagctctcggtcggcctcgactagtcgaaccctgccgcctgtccaccctttacaaccccctgccacgacccctccatgcatccatctctcataccctcctccctccaccaccatcccctgcacgacctctttccccttttctctctaacggccttcatctctttatcctgtgcatccactgcaagcatgctgctttctttccaacctcgaagacctcgcaactggatgggccggttatccaaacacatcagatcgtcctcgtcgccgcctcctctctacgccttgtagtccatcgcgtgcggctcctctgcgtacacccgccggtactcaagcaggacgcgccagatccacgcctggatgtcctcgcgccgccagtgacggtccacaaagttgcggccacgctcgccgatgtcgcgtgcgagagcgtcgtgcgcaccgacgccggtcgagggcgcgcctgcatagaaggccatgagcgacggcaggtcggacgcgtcgagcttgaaggggacatctgcaaggcattgttcccgtcagtttgcaggcagtgacaagggacctaccgagcggacgcacagtggtaaaatggctcgatcaaatccgaaaagaactctggaaacgcggtcgctttgaaaacgagcgagtcctgcgacgacacgggtcagcctcgagagcgcgaccaaggcgatgaaaggcgagaacggaccgtcatcaagagctcgcggaagcggccactccagccaaagctgcaggcggagaggggcattcagcgtgaaatcttgcgcgggccggtgctgtagctgaaggacgcacccgtcgacgtctgcgataaacttgtagcgctcgtagtgcgactcgttctccttccatttgaaaggtgcgctcgggccctcgaagagccggttgattacagcgcattggtcatagccgcagtcgtgcttgtccgtcacgccgcactcgtaccagccgagcaggtccttgcggagggccgagccgtgctggaccttcgagccagtctcgggcgacgaggcatagatgtagctctcgaagccgaccgcgtcgttgcactgcttgtgcagtctgatgcgctgggctagaagggaagggcagtgcggaacaggcgtcagcgaaacgagaaacggcagagggaagccggcacgccacacattcttgccagtcgcctgtgataacgagtcaagtcgagtagtcagcgtctgggcttgtaagaggacaagacctgcgcaacccaccgccgatcgtgtggctgcctgatcgcggagggagcgtgcgggatcgtcagccctcagcctcgccgccaaggtcgccactctgcgcaccagggtaggtaacctgggatagcaaggcaaggttgcgtcagcaagccgtcgtcttaggctctgtcgctcgtacgcactccggtcgctttgccgcgccagaccatgcgcgcctgcttctggttccacggcggcggcgtgtatccgtccggcagcctgtctcgcagcgtcgggtacgagtagagctgcgggatgagccagtcgacctgcagcagtcaggaaaattagtgggagggcgacttgaccgaagcgtgcaagaatgctcacctgggtcgggagcttgctctgcgaaaagtagggcagcacctgcaaagatgatctggtcagcggcaacagctggagtcgatgcagaagcgacccaccctcgacttcggcgttccgtctggattgacgatcgagttgaagtcgctccactttcagagacagtcagcctcagcacgcgaaacaaccggagagggcgactcacctgaaggaacaagccggcgacttggcgcaactcggtgttgtagcaggcgtcctgcgcgaccgaggcgttgaatacaaggccgccgagctcctttggcagcgcgtagccgtccgatgaatcctcccagacgagcttgccggtcatgaggtcctcgtgaaactggcgtgcgggtgagcgcgggcagctgagggcgatagccaggtagccggtctcgcgcgagtgggcgcgcatcgtcgcgttcatggcgttttcgtgcgactgctcggccgactggcggcggccagcctttgaggcgtttcggaagcgctcctgctcatcgtggagcatggtgatctgaccgagatcgtgcgtagaatagaggaagtcgggcgtatccggaagcagaggcaggacctccttcatggcctgcaagggagcagcgaggaagtctgatcagcgcaggctgcgggcacgttgagcatgcgagacgacctacctcacaaaactcccagccgctgcggcggcccgagccgatttctttaacccacttgctcttcccgcggccgacgcattggccgttttcgatccggatctggaagaccctcgtcaggtcgtcgacgactgggttctcgagccgaaagtcttccacctgacggcggaggctggccgggtcaaagccaccaaagacctcgattgatcgctcgaggcggtcatactcgtccgtgaagacgacgtcgttggcgcgggcccagcgaaaccagtcgtcgaagccggccggcggtggacgtctgtagcgctgcaagaaaaagacgatgcgacgatggtcaggccccaagactcaatcttgaaggactcgagtgggcacaaaatgcacgcgtcggtactcagcgacagcctgctccagggtccgactctgtcggtcgcgacgcttcagccagctgtccgaaagaggcaggggtgaggggtcagctagagtcacaatcagggtgtcgagtgaagaagcgcaccgctcctcagcagcctgcataagcccaaagattggatgcgcttgctcggagggctcagaagcgagctgggctgcggcacggctggaattggctggaaagccccaatcgaaggtcgacaacgcgagtaggctcccctcgagaggcaggccaggcaggagccgcagcatcagcgccacaaggccaatagacgccaggatgaggacggccgtcgactggctgggacctcggcgagtcgagtgacggatgccgcgggcgaggaaggctggcgagagcggcaccagcggagatcgaggagccgccagcgagaggggcgttgttcgcagcgccggaggccgatcggagctgaactccagcatggcgggtcgaagatcgctgcacaggtcgggtgaggtggagggcgagctggtcagctcctgctcgagcctacgatgagctcgcggaaggcagtgaaagggagttgacacaggtcccggcctggcgacccatgagggactgacctcgagaagcgtctgaggggagaatggagagaggcaaggaggtgctggcccgtcgggatgctcaagtcgagatggccgttgggtggcaggcgtccgcagcttgccgcccgaatgggtgagcgaaaagacgcccctgtcggccggtcgctcggcttgccccttttgtgtttcgccgcaagtcaccatcgggccgcgcaacggacgagcctgctggaggaacggggcgagatcgatacaacacagaacaaagcagagtcaaacaggacgacgcgaggaagggaagcgaagtggcagggacagcgaatgggcgaagagcgacaaagggtcgggaggctgcggagggggcgctcagagcgcgagcgtctggaagttcgggaagacgagctcgtctacgaccatcttgcgaatcaggctgaggatgaagctgcagagcaataaaactgggtcagtccagccgagcaaatacaggtcaaacaacaggccgggacgcaccgctcgaccttggcgacgttgcgcagcacccggtcaccctcctgtccgatcgacgactccatcgacatgcgcgggatgagtcgctcgcccgccggagggatcttgttctcgccaaggtgtggtgccagcggcggtgtgctggtgcctggtgctggcgggccgtacggatccagaggatcgaggatggagaggtggacgcgccggccgttcgattctgctggccctctgcttgcagacgtcgagcccggtactggacgctccgactcagcctggtaggcgagaacaacgtgccagtcaatctcgacctcggtgacggtaagcgtcagagggagcaacatgaaggccggcgacgggtggttgatgagcagggtggtcgagagcgagaagcgaatatcggcctggtggtggacatggacgtgaagctggagcgacggcgcgcccgagctgctcgccttcggcggcggccggtccccggaatgctcgtccggcgtcgttgactgaaagtccggaccgccgacgtgcgacgacggtgagccgcctcgcgagacaggtccccctgcgccgccggcgagcggcagggacgcaaaggacggattcctgctcaaaaaaggcgttgccatcggcgtcggcagggcgctgctgagaccgacgcgcgacgtaaacgggctatggttcgtgtagacgctgttgaagggcggccggtagccgaccagcggcgacgcaaaggggccgccggcgaccgacgaccgctggtcgcgaccgggagcggcactgtatgtcgaccgggcccgacctcccgccgccgagaagacgtcgtctgccgtctgctgcccttgctgcggaaagccgtagccgtcgcggccgccgaagccatcctgatggtgagcgaggtgcgagccgccatgggaccagtcgcgcgagccggatctgccgccgcctgcgctactcatgccgtcttgccagcggccaccagcaccgtcctgggagctctcgccaccgtcctcggtgccagcgtcgtcctcatcctctgccaggaagtccgggtagacgtcgccgaggccgacgacctcgatgtcgggcgcgcgagagccaaagtcaaacgagctgacgctgatcggcccaaggaacgacggccggtctgccgtcgcgaggtagcggttaaaggcgtcgacgatgccgtccgtcagagctggatccgacaggagcgaccagtcgatgtcgagtgacattgggaggacggaaaggggagggaatcgatgtcggagggcgaacgcaacgcgggcgagctcgaccaacctctattctccccttgacaccatctcgctcttccgccgctctcccttccttacgaccatgggatcatctgtctcaaaggtcgccaagaaggcctatccctctgctgctgccggtgctgctcgcgagaatatcaagtttacccctccgccagcggccttcccgagtgccgctggcgcagggcgcagtcccaccgatggctcgtcgacgaccgctgcaggatcggcaccgctcgcctcggacagcaggccagacggtacgtggctgagcgagcctggtgagacttcactgtgattgctgacgcgacagcgatctttcgtaaacccgtagagctagagcggtccggcgggcgcgacccggctttcctgtcgaagctcgccgagctcggccaggtctcgacgcagggcggcaagccgaacttcaccgcacctcgagaggttcgtccaagacttatacttgctgcggtcccacgagctgatcaactggccgccttgctgcagaacgaatctaacccggcgcaggacctgcttaggcggcggaacctcgacccgatctcgttcccttcgggctccagcgaggagtcgagcccgaccgaggccgagtcgcacaaccgcctcgacgcaccgacgctgatcgccctccttgctgcccggcgcgaggcccagacgcccgacgtggcccagtcgatcgccgagtcttatggggtcgacctcgagctcgtcgaccagctcgcggcctttgtcaacccgccgtcggttcgggaggacatcgtgcgcgtgacagatgacggcgagacgacgccagtcgtacgttcttcttgtgctgctgccggccgtcttgcccccaacttacgcgctgactgtgcccatcgcgcttgcttctccgacgacttcaggcgctctggatcaacccaatcgtctctgcctcccagacccgtggcgagcagaagaagatcgcatgagagctttgacgatgatgggagacaacagctaggtgtacaaggacgtccagggcgcaggtaggcccaccgaacgtgcggcaaagggggacctcgggctagatgacggctagaggtcgtgaggatcaggggcgcagcagcgaccgccacacgccccagcaaggcaagcgggaaggcgggtcgcaaggccgacctagcgccgagtgaagtagatggcgagtccaatggccagaagtacggcgttgaccaggatgactggcgcgatatgcttgccgtagcacttgaactcgctccagaggcactggattaggccgagaggcattgggcgccaacgtcagctgccgaccgaccgatcctgcttagacgacggacgaacctctctcgagaccttgggcagccccggcttgcgctcaggtggcgcagacatcgtccgtatccggtgctgaagcgaagtcgctgagggctggccgtcggtgctggtcgaggtcggctcatcggcgcctgccgaggggaaggagatcggctgctgcgagtagcggtgtccgtgctgcggcaggaggggcttgcggtcggccatcgtatagggaagtgtccgagactgtgtctgtctgaggaggtgtcgggcttctggaagtcaagaagaggtgtcgtcgtcaagagccaggcgagtcgagctggaacgcctgcggatgggcgaggggagcgccggcttgcccctgacgtcgactgcctcgccctccctccgaccccaggacgtcagctctctgaaggcctgcagacatggccgagcagatcaagcagcactccatgtccgtcgaagttcctgacaacagatcaacagcctagccctgtcccgactcgagggctgaccatcaactcccccctccgaccaacgttcgctcgcccgacagccagttctccattccgcttgcgtcgacttcccatgcgacgatcgtcaagcgggcactttcggttgaccgggagcggcatccggacgaggtcgaggtcaccatgaacgagtttgagtccgggctctcaatgtcagtccccaaggcgccggcttctcccctcgaggtgctcgcccggctgacaggcttcgggctcgcagaacaatccagacgacgacgctccgtctgcttcggatgaatgtcaactctctctttgagaacctcgaccttataatccggacaatcgacggcctcaactttggcgacgaggcgccgcccgtcctccctgcggcctcgagctgagcctgctcgcgcagcgcgagctttcgagcgccgatgagtccctcggacgaggcaggtgaggcaccctggcctgccggcctcttcacggtcgcgtccgcagccaaaggacgcctgcatccacgccgacggtcggccgcaccgccatcccgcgtcagccctccggctcagactctctgcaacacaagaccgtgatccccggcccatctgcctaagctgctgtgtcgaagaagctacaaagaagcacggcgaaactgcggatgcttaatggacatgcatcatggcaaattgcctcattgatgggtggtctcttacgccgagcgagagtcagacgcagtgtcgtgccgcacatggcagaggctcgtcgtctcgagccgagccgctgggctcaggaccctgcgagactgcccggaacgactggacctgattggcagtagtagcctgcgtcctcgtgcgctggacattcagctggtgcgccagatcttgaggacaaagaggtgctcaccccccgcacgacgttgcagcgcgacctgtcacccaaggcttaagtcagcttgcgagcacggtcaagtggccgttgcagcttctcgcacttttccgtcgagacggcctgcgctcgttgttcgcagccggtcaaggatcgccagcggcttgttctgcttgatggcgacgaggtagaagatgccggccggcgagaggatgtcctgcgcgggtgagggccagacgagcggagagtcagaggacaggccagcgaagacccagaagagagatctggattaacctccagctgcgtcaagaggtagctcgtaagatccatgccgtcggcgcctcctgcccaggtggacccgatgccctgcgcgacctgcgtcaggtcgtacctgttgcaggggtggggagcgcgtcaagacaagttccactgctgcaaggtctgtcggcttaaggatatcaaggcggccacaactcactcctctaatgacgttgggacgtaaggcggattgaagacgagcaggtcgatccttcgcagcagtcgcggaaacagcgcggcgacgagattcgtgagcaccggatgaactgagacctaaatgacagagtggattgatcagagaaaaggccagagagaagagggcaggacgtgcaagcggaccttgttctggaggccggtcaagtgagtgcaccgcgcagcgtgcgggttgatgtcggtcgcgatgtagactgcgaagcacagtcaggacgtcgtcggacaaggggcccagggaaggaccaagggaacccacatgcatctgtccctccgacgatggagccgataaagctcgagacgatgcccgagccagacctgttgggcagcagcggggtcagcgacggcggcgaccgacaggcacaagctctcctcggctgccgcgacgcacccaatctcgacaacgacccgcccggcaggcccagcctgcagctcctcgacgtcaagctcgagcgcatccagtagaatgaagctgtcctctgccgtgaccgggtcagcgctggaggctggtcagctacgtaggctggcggcctcggccgggctggggcgcgcaggcgtcagggcgagaggacgcaccggccgggtcatagacgacctcgtagtccgccttcgtcaggtggtcgaggttgggcgtcgcgaccgacatgcaagcgcgcgtctctttaggtatcaacgttcgaggaggcggataggagtcagtcagccgccaaggaaccctccgagagccggcggaggagcgcaagcctgccctcgtttcacgtctgacgttcaccctctcgtcgctctccctcctctcccaaccctcccactaagatgagcaagatcaaccagcccggcacgcagatcaagtaggtcgcctccttcgccgtcaagagaaactacgaagcctgggcgggaggcggccgctcgagccggatgtcagcgtcattatcagacccttgctgacggctgccgcctctctctgcgcagattgacgaacgtctcgattgtccggctcaagaagggcggcaagcgctttgaggtgaccttctagcagctagcatccgcgccagagactctactgagctctctaatcgtctcgcagatcgcctgctacaagaacaaggtccaggagtggcggaccggcgtcgagaccgacctcgacgaggtcctccagattgagcgggtttttacaaacgtcaccaagggccaggctgccaagtcggacgagctgagtaaggcgtttggcaagctcaagcaggacgagattgtcaaggaggtgcgtcgtcgcttactgcagtcgggcgcagccctcctaacctctccgcgcagcgacgtgaactggcgtccttagcggcagccagcagctgatataacggctttccttgaccgtctggcagatcctcgccaaaggcgagctccaggtcggcgagaaggagcgcgagcacaacgccggcaacctcctgcgcgacattgcgacgcaggtcgctgagaagtgtgtcgacccatcgacccagcgggcctacagtgtcagcatgatcgagaaagcgatggccgagattggctttagtgtcaagacggacaagagcgcaaagagccaggtctgttgtcggctgctggacgtccgcttgcgagtcgcctttgaccgactctaacggttcgtcccgctgcgctcctctaggcactcgactgcatcaagcagctccaggcgtcgtcaacactgccgatacagcgcgcccggatgcgcatccgcatcacgatgccgaccaaggacggcaagcggctgaaggagcagatcacgagcgcggccgacgcggtcgaggaggacgacacgacgtcggaagagtgggagactgtgcgtcggccgccatctccaagcaccgccgctgactgctgacaccctcctctctcctcttgcagatcctcctcatcgacccaggacagttccgcgtcctgaccgaccttttgcagaaggagacgaagggcaagggccggattgagacgctcaactttgcagccgtccagggcgagggcacgctggattagacgctgccttgcgtttgaatctctgcctgcgctgagttgtggccagctgcaggcagcgacgaagctttgcggccacgggcggcatgagattgagcggtgaggggggtggcaaaggtcggcgcgaaccgtctaggcgtgcgaggttgtattacagaagagtacaagcatggcgagaagagacacggctggctcagaccttgaagccgtagctgtcgcaaagcaggtgatggagagagaggcgaggtcagagaccgctgctgctgcgggcagtcgatgacgaccggcgcagcgcccggtggcgacacatccagcctcggacggagacgtacccaagcatgcacgcccgatgggcttcgatgaacggcttgcagtcgatctctgcattgtccgagcccatgaagcactggtcgcgcttcgacttggtgtctgggcaggcgcaacacctgaggggcgagggcgttgaccaagcatcggcctgagctgtgtcagccgtcgagtcgaggtgggaggcagacgaacccacgccgcgaaagccagctaaaagcctagctcacgcgaaggcaacagcaagggacgcacggcttcaggccttccgggttgagctccgtcacgagcgccgggttgctcggcagggcggccggcttcgagggggatgcggcggcggcggcggccggcgcaggcggcgcgtcggccggtgccgacgagaaccaggacgagaggaacgacatatgcagggcggggaggagacgcaaaacagagactgaaggacggccgtcagctgccttgtctcgcgctgctccgatctcgctcgagactcacacaggaagacgggcaaagaggcgtgcggtgatggtcggcgggagaggcccgtcgccgagcaggttgcgccacccgacgtgcgggcagccggcgcccaacttggactctttcgcagctggccgaaatcgcaggggccgcgagccgaacgaccacgcttcgtcttgtcgtccctcgttcctcgtcttctctgccaacaccgaccctgatccctcgcaagcatggtcatgaagccaattagagctcgcgcaggagagactgaaccgctgctcgcaagagatgtccagtcctcgccgtcaagagccggacagtcgccggtcgcgacgacggcggtcggagcacgccgctttctctcaccctacgtccgggtcctgatcgcctcgttctttctctgtacgtaccaccaaggccgatcagcccaagtagagcagactgctgacttctgatggcttcctcctccaagcggtctcgttcgtctttgtaagttaacggccggtcacccgcgacccctgcgtgatccgacctgcaccccagcagggcccggcgacgagatccttaccttgtcgcccttcttgcctgatcagactgcaacacctctgctctttgcgatccgcacgatggagtgccaggactactacgcccacggcgtcctccccccgcccggcctcggcgaccggtgcgcgctcaaagaggtcgaggctgcgacagcaagatcaatctcgatcatgttcagcggaacgacggtcgcggcctttctcaacctgctggtgacgacgtgggagatcaagcgctttggcgtccgcctcgccctcgtccatcagacggcatggcctgcgctccgcgtcctctgccaggccttctcggtccggcacggtggcaggctcggcgttcagctcatccaggttacgcaactgattacgatcctcggcggcggagcggggtgagcctgccgcagaaatgcttgccggcttgattgaccatagctgacttcgatcttgccgcctcgttccagttacatgctcgcggccaacacattcctgaacgacgtcgtcggcgacgaggagcggaccggcgcattcggcgtcctctctggcgttgccatggccggcaccgcgctcggctatacggtcggcggtctcgccggcgacctcattgggcccgtcgcgccgttcgagatcacatttggtctcctcgtcgcctcgaccttcttcaccgccttctttctgccctacatcccgcccgcgacgcccgagccggccgagtcggacatcggctcaaagcaggccggatccaccggtggtccgctggcgtgcctccgcgtgtttgttccgcgcaagaacgacgatggtaagggacggtactacggcctgacgcttctgggccttggcgccttcctgggcgtcctggcgacgtcgttcgtcgtacgtgcgaagctcagactatacaagctcagactccaaagctgactcggcgaactttcctgtctccagcccctgatgctccagctaacggcgacaaaccgctacgacttcaagccggcccaaaacggctacctcatgtcgctcaactctgcctcgcgcgctctcttcctcacgctcgccttcccgcgcatcatcgctcgcggccggcgctggtactcggccaagcgatcgctggtcttgaccggcccgacgtcgacaagcacgccctcgccgacgccgaccttgatcgacgccgacgaacttccgatcacggccgaggcgtttgagcccgcctctggtctgcaggaggccgaggagcctgtcaacgtgccagtctcaatggcgccgacagacgcaaagcatgggtcggctttcgacctcgtcttcctcaagtgcgtcccggtctcagtcggaagctgatgcgaagctcgaagctgacttgacctttcttgcttgcccgtgtcaggtggagcatggtgcttgacgcggccctgacggcgctcgttggcttcaacatgcgctccagcgagatcttgctcgccgcccttatcctgccgctcgcttcgggtacggcgcccgcatgcaagggtgagccccgagctcgcgaccctctttctccagtcgacgctgagcccgatccctcgttcttgcaggcgtcatgatggagctcgtgcctgccgcacagcgggccgacgccctgtcggccatcagcctgctcgaaacggccgcttacatcgtcacagggtcgctctttggcctcgtcttcagctatctgtccgagtgcggcctactcaattctcttcctcgcgacgctcccgctgacccaagtgcccgtcgtcctacagcatcggcaagcccaatctcgtcttccccgtcaacggaggcatcgcgttcgtcgccggcgtcgtcctactttttgtacgcttcccccgggcgagacgcctaacgagcgccgcctaatggcgcgctggcacttaggatcagcgaccccttcgctctttcatctgtctcttcacgaccaggtccacgatcggatgaccacttcatgttagccagagaagaggaaccacctcgcgcggcagtcgaccgcctccttacggaccgacctccgcttgtcgtcgagagcccgaccgagctgccggaggacagtcgccttaaccggatggaggacgtcgtagcggatgacgtcgggcagcgcagcaagcgttcgcagggcggccatgcgcgaccgctcgttcgaagcgctgacgtccaagcagcggagcagggcctcgacgatggtgaccgcctggcgctcaatcacctcttgactggaggcgtcgtcgacctgggccgcctgctcgagcgtctgaatgacattcgccttgaggtcggcatccggcaagtcgagtgaccggaggaggaaaggcaagagctgagaagacatcatcgcgctcgtcagcggcacgcagggaggactcgcgacgttcggctgacgacgcaccgttggcaggaacgagatacagagagcctgcggcaaggcggggataatagatgcgagcacgacgaggtagacaacagcgcggtcggtgcctgagatcggacgagagaaggtcagccgtttgtcgccaggatcgagcacaggggtgagacgccaaacgcacccttggcgaccgcaaagccctgctcgacttttggaatgacgaagttgaagaacttctgcttgtaaagcagctgataggtcggaggaggagtcgatttagcgagattcaacatttgtagagcctgcaagacgcataagtacttacgcggatgatggcgtggttctccttcgtcaggacgccgtcgccgtcgccgtcagcgatgatcgccagcgccttggccgcttcgaggacgagctgctggtccttctcggtggcgagcaggtcgagcagctgcgacaggaaggtgtagcccagcccgtggttgcggacgagcagagcacggcacagctgggggtgcgaagcgtgaagtcagcatcgactcgctccttgcgatcgccgaagcggatgctccgtgagcgacacacccagacccatgcccggatcgaccgcatacgccggacgcgagctgcctgctggttcgtcacctctgccgaccagaaggatgggacaacgtgctcgagcattgaggacaaacctgaaaaaggggggtcgagtgtcagcgttggcgtgcaatgacgctgaggatcggggaggagacacacggtcgcaacgcttgttggagagcgacgcgaagaggtggaacatcgacttgagctggagggccgtcgtcgaggtcgacaatgaccactgcaggacgtcgccgaggaaagtggacaaatcggctatcggcagcttcacctgcggattggaggaatgtcagtgacagccatctcttgggagaaggagacgctgaacacacgtctggccgaagtgcgatcatgccactcgagtagaggacgagaaggtttcgctgcgatgccggcgcgtctgcggccagtggggcgacggcggtgccactttttgagggctgctgcgtgatcaaagccacctgcccgtcgacaaaggcagcatgcagcttggccacaaagtcgttctgcttgctgctcgccggcgaacgttagcaggtcagtctgggcagctggcactcagcgagacgacggccaggcacgcacttgacgggaaggctctggacgaccagctcaacaatcttaccgccgacgacgacgagcctgggctctgcggcaaggctgctttggccaggctccgccccaccgcgcacgtaaaaggcgaagagcgaaggcaggagctcgtccgcgaacgccggcagatcagggtgcttagcctcggacttcttccgcaagaccttctcgacggtcacgaggagagcgaacgcgtagacggccgcctctgccgagccttctgcataggacaagctgtccagcttcgcgagcacgtgcttgaccaacagcgcaaatagcgtcggctcgacagcgagcacgcccaagcaggcgagcgtccgccggtaggcgactcgagcgtcatcctcgtccatcatcggtgcgaggtcaggcagcatcttgaagagcgcgggcaggatctgagcctcgatcaaagccgagtcggtcttggcaatctcggcgaggttgttgagcgcgtgctccctgcgcagacagagcgtcggtcagtggcagcaagctaatgaggggcggcctgagagtggcctggacatcacatacggacctgatgtcatcgcctacgccgtccgcaccgaggagcgacccaattttgctgacgacgtaagatcgctcgttcgtctcgagccagggcagaaggcccattagtccctccatggccgccagccggccctcgtcgacgtcgagcccggccgacaggcacccgagcagctggtccttgaggtcgatgaggataccgtcagacgcggcggtgcgggtctcgcctgacacggcgtagagggcagcagcggcgtggatgagggccgagatcgaggtcaagagggcctgcttctgcgtgatggacgttgaggccgcatgaaactggccgagcaactggggcagtatcttgccgtacgtcttgcggccgaggcgcgctgttgcgcgcagaaaatggcgagtcagcggcccgattgcggctgccgccagtctagcgagcgatacgcacccgaagcggcgaaggccgcgccgaccatcttaacaatctgggccgccaggctcttttcaggctcgcgcagcgttacctccaactcctcgaggatgacgccgtcgaagaagtcactctcggccgacgcgtcgtcgccgacgagcacgcgaagaaagaccttcatcgtccggagagcagcagcctcggcctcatcagacgacgtgtacataacctggagcggacgagttctgccggtcagcgggaggttccggcttgcagcttgagcgaagaaaatgcagacgaacctccaccttgaggccctcccagagctcagcctggtgggcctgagcgttgtcccggccgaagacaggaaggcaggactcagtcgtgcggagcgtgtcaatcttcatctcgccgccgctacccgagagcttctcgagcaggaccggcatcgcctggcgggcgaggagcggactgcccgcgagacacgctcgaagcgccgtccgcagatcctcggtcgagatgccgtaagggtcgcgtggcggtggccggtacgtgatggggaagtagcagtaggtgacgtcaaagagctcttcgatggccgtgtcgatgtcgaactcgagaataatgactttggcgagcgagaacgcaatcaacaggttgcgcgggtccttctccccgtcggcaatccgagtgcaatacggcttgacgaagccgtccgggccgaggcgaatgagagctgcacaatggtgagattatcgggtgccggtcagttcttggctccatcagtggggaatgatcgtctcgcgcacgcacccggtcggtgcaggtgcatgagcgtgtcgatcgtccgaaaaaccaggtagcgagtcgcttgtgcgagcgatcgcatgttgatcttcagcagcctatttcaagatggttcgcagaggcagtcagtacgcgcacagtcgggcgggtcagactgctcgaaccggggcgacgcaggacgcacgcggggacgagcgccaacgtctcggaggagccgaacgtcggcaggccgctgagcgtcagcaggccctggagcgccggagtcaggactaggacgtccgaaagcttgtcgatgtagaagtcggtcaggacgcgagctgagagggcggagtgaggcgccgccggagacgagggaacgagagagtttagcaagggatcagctcgaatccaacgcaagggaaagatgcagctggaaatgctcgcgcactagactggcggttgatcctgtcctttgggctctgcgccagaacggcagacagcaaagcgagagctgttaaacgagttgcaaagggtgatacgaggctctctggtcagcgagctgaaggagtcgctgacgcgcgggcgcgtgctagctgcgccgctgtttaggaggggacgcacctctgagccgcggctcatcatcgacacctgtcagatacgcgccgagggccttgacaaggccgagcaagccgagcgaaccagcaccgccattgacaactgcgagagtgatagaaggtcagccgtttggtctgggatcaggcaggaagccagacgtcgcgacgacggacggtcgaggagctcgggcgagagcgtcgtctcgccggtggcgatgtaggtcgtgacgagctgctgagcgtgttccaacgacatgtctggcggcaagccctcctgagggcagactgggtgaggtcaaaagggtaggcggggcggagtggcagatgaggttagggagcaagcaggtcggctcgttcaggaggtcgccctcggaggaggctggccggcttagggttaccaactcgcaacgaggagcagcaggaggtcgagccggccaggtcaagactcgctcaacgaccagccatcccgcctcctcttgtcacgcgcccagaatgtccttctcgacgccgacgccgcgcaggagagcgccgccccgtcggactgcccagcaggccttcgacctgtcgggctcgcagatgtcgtcggtcgcgccctcgctgcccgccgctccgtcgacggccggcgtcttcacgcctcgcgccgccatccagacgccgctcggcggcaccaagcggtccttcccgtcgatggcctcccaggacgagcagatgacggacgttgcgacctttgacggcacggcctccgtcgccggcagctcggtctttggcggctcggtcttgagcgagctgcccgaggacgatggcgcgcgcgctcgcaaggccggcggtcggccaagagaggtctggatgaacgacggccgggtcgaagtctggaaaaagggcagcctgcctccagcggtccagcatgcgctcgatcaatctggtcagtgcttcgctgcagttacggaggttagtacgagtcgtcggcgtgctgaccgacgaggagcttcccctcggcagacctctacacgagtcctctgtcggccgccttctccgagcagacgggcttcgcatcgctcatcacgcattcggtgctctacgtctggtcctaccttgtgcgtgcccgagagcgtgtcactctagaaccctgagtcagcagaactgaccagcttgaccgacgacagaagcctaactcgacgctctacgtgttcccgctgagcccgccagcctcttcgcacccttccatgctgccgcccaagtcgcacgcgctcctcctacccttggtttccgccagcgtcgtctcgcgtgagccgagcgtcctcgtcgtcagcccggccggcgagctccgcttttgggactcgctctcggccgccctcgtcgatggcggaacgcgctttgtcgcgtctgacgttatcggagcgctactcgccgacggcgagtcggtcgatgggctctggctcgcgggcgatggcctcggcgcggtcgtgaccggcgacaagggcggtctatggaaggtcggcgtcagctacccgggaggccgggcccaggtcgacgtcgtctccttcccgcgggcgacctcggccggcttcctcggcttcttccgctcgcctgcgccgtcttcgtcctcgtacggcggctcggctgccggacctcagccgaccctcgttctcccgctcgagaacggccggctcctcgtcctcacgccgcagtcggtcctccagaccttctccctcccatcggcatcgcggccgcccgtgctcgactcctcgacaccgcttctgccggccgtgctcgcagctctgcgggcggacgagcgcgaaggagtcgagcttagtctcgagatgcacgacctccgcccgctctcgcctgcgggtgagattggcattctcgtcagctttgaagagaccggcatgctcgagggcggccgccggtcggccatcatcggcgtcactgcaggcttgcagggcgacgtcagggtgtcgcgggtgttcgagagctcgacccggatcgtgcgtgcctggaggtctggttgctagctcacgcgcttcgtcgctgacgagagcttcacctcttcctctaggacttggaccctcggcccttgcctccgccggccttcattcctctgccgagatctcagcaggcgctcctcgtcctgccgtcatcgctcctcctcatctcgctctccgagagcaagtcgttcgaggagcacctgctcctcaaggactcggctcgcaacgccttcctcggtgtcggctccatcggcggcgcagctggtgaggtcggcatcgccatgaaggcgggtggctttgcctgcatgaccatcgctccgctcggcacgggacccgccgagggctctggcaaggacgccgacacccgccggctcaagagtcgacttgagcaagccatcttctttggcacgaacgcaaacaacccgctctcgtttgacctgacaccgtcgttgccgggctcgctgctcgcctcgacggcgcaactgtcggctcagatcctgagctcgtccctcccgctgcttccacccgtgctcgacacccgtctgtcgctcgccgcccggctgcagagcttgacgcaccttgttgagctcgtcggccgctgcggccttttgggcaagctcagcgctggcgcgcgccggagcctgctcgccaatgccgagcgactgagcgcaggcggcgaggcctggacctacttaacgagccgcatgacgtgcgtcggacctgctgttgcgcctcgagatagaaaggcaacgagctgacacgtctctgccggaactcgcagcggcgaggatctcgccgggacgcctcgcggcctgctgtcggacgccatcgcactctacatgacgcgcacgccggcaggatcgctaacggccgccgcctaccagggcgaggacccgctccggctcttcttccgcgcgcggatcaaggacctcggccaagtcctcgagattgtcggctcgctcgcggccgaggcactcgaccggtccgacgatgtcgaggagcgcagccgctggctttccgagaccaacctcatcttcctgaccattttccgggcggccttccgccttcgggaggaggactgcacgaagtacgggctcgatgcgcccgacgccgtcagcaagggcgcttacagcgagccctggtggacgacgtcaccgctgctggccttcctccagtcgttcgtcgagcagacggacgacatcatcttccgccggacgcgcgagtttggctcggccctcgacgaggcgactagcggagcgggcgtccagaattcggagcagcttgcgcagagggagctcaaggaccagctcggcgagcttgcgggcgtcctgctcgcgacattcgaggcacgcatccgctacctgcacgcctaccttgacaatgccggcggcgagggactcagcgaccgcgaggctgtcgagctcacagacagctaccatactgtccggcctcgcgtcatcctcggtctcggtgggtcgcgacactctttggaggcccgactctctctacctgcccacgtgacgctgacgatccttcgcatgctgcgatctctcgcgcagtccgtgtcgaccacgccgaggaggccttcaaccttgctcagcaccacagcgacttccgggcgctcgtcgagctctgcaaccacccgaccgtcggctcttcggcaaagacgcagtactacatcgagaagtttcgggaggactttgctttcaagctataccagtggtatctcgagaagggtccgtcggtctctttgcgtggtgcggcgtcctggtgcttgtcgactgaccgatgagcctccctctcaggcaagatgaagacgctcctgacgcaggatgaggtctacgcacccctcctccttaagttcctcaactcgaccgacaactcccggatcgcctggatccaggacattgcgacccagcgctacgagcatgcggcccagtcgctgctcaatgagtcggagcgcgagccgaagctggccgagaagcaggtcggtcctcgtcactagaggatcttggcattggccgcgcggcacctgacatccttgctttgtcccatcagctcatgctgagcatcagcaagctctgtcaggtctcgagcctgagccagcaggccaacccgtcggaagccgcgcgcaaacggctcgatggtgcgctcgtcttttgagcggcctcacttgaccgccctgttactgacgtgctgtcggacactcgccacaggtgtcgacgaccggctcgatctcatcagcgtgcacgaacggcttcggacgctcttccagggcgctgccggctccgttcgggatgcgcacggcgctccggcctcggtcgaggaaaatgtcgagtttgcgacgctgcagttggcgcccaacctcgccgacttcccggccctccgagctgtacgtctcctcgccaccgtgacgcaacttgcggcccagctgatctgaccgccttcttccgcagctcttcatccgactcggctccagcctgatgagcggcaggacgctccggccggaggacctgattgatctcctgacgctcaaagccaatcaggccgaggatcaggttggtgactatgcgacggcgctggacgtcctgtcgagggcaagggtgagtcgctcagccttcttagccgttgagcgctcgtactgaaaccaagtaccgctcgcaggacgtcccggccggccgggttcagatggcggccctcggcatctggcggcgggtctacatccgcgacaactggtccgcactctcgaccagcaaccagaccgaccagcagctcgaggacatcctccggtcgaccgccctctaccacaccctcagcatcctccgcggttcgtccggcgtgtaatcgtcatcatcgtcccagggcgattgtgctgaccgcgcccacctgttgcatgcagagatcgcaccccagacggcgccgctttctccctcggacgtcgttctgccctcgtcacacgtcctgccggccgagcttgcagcccggtgtgccgacgacagcgccgacacggtcgaggcgctgtggcgcgacctgcgggctgagaacgacgcgcttcgcgcccacctccaagagggtgggctccaagtcggcaagcgcgggcttgaagtctggagcggcgaggtgatgcgcctcgtcggtggcgatgtgagcgagtgacgagacgggaaccacatctatacaacagcacagcagagccttgcagatacatgggaggctcagcacttgccgttggctgtgggcagtccaaaaggggggttagggtctgtgcgctgcgtgcggatggacgagagagacgacgacggacctccagggatcaggccctcaaactcctcaatgacgcggaccttgtcttggcttgctgatgactcgtcaaagacgtagctgcagggcgagggccagacgggtcagcaatcggagagagtcgcttcttacagccccggctccgaccggtcggaccacgccgccgacgagccggacgagcgatcagggccttccaggggactcacccgagccattcctttgcgagcctggtcatcagctgctggccgacgacacgctggccaaagcaaatgatctggcagtcgttgctgaggatcgagcgctcgacgctgaacgcgtcgtgcgcggtcgcggcccggatgccggcgaccttgttggcagcgatcgcgacgccgagaccggtgccgcagatgaggatggcccggtcggcctcgcccgccatgatcatctggccggctttgatggcgaccgacggatacggcgtctcgtcctgcggagggcgagatccttagcggttggcagcagcgacggcaagtgcggcccgacgcgcggcagatgacggcggcgcagctcgcgagagcaagctcaccttattgtgcggcacgccgatgtcgatcagctcggccacacgcccgtcgccctcgagagccttgatgagtgcggcctgtagagcgtggcaaggggtgcttctgtcagctcagtgggagggcaggttgaggaacgacaggaagcaccttgtactcggtcccggcctgatccgagccgacgatgagacgccacgagggggaggacatggttgtgctcggtgtggcgaagaggcagcgaggacgagcgcgtaagagagagagtggtcggctgcgtagatggatgtggatgttgaggaacaggggcgagcgacgggccatgccagaccagctcatcccgaccggccggctgcaggcggagttgtgccgggcgagcgggcgcggttcctcaagatcgtgccggtttcgcgccggcgtcggcaccgaccgatctttccgaacactatcgcacccaaagtttcagcagcgcttagtcaaagagaaggagatgttatcgcacgaacgagcgcccaagtgagagcgaacagaaggagagggagcggtcgagagtcgatcggccggccgactcggctccgcttgcagacgcattccgccaaccgataagattagatgccgctgcaagtcagcctcactgctgccgagtgctcaagctctcttcggcgaggacagggcggagccagctgaggttgggaacgtggccagcgtcagtctcgaaattctggatatgttgagtcgtagcagacgtacatctcgcccggccggctcatgtcgcgcaggaggcggaacggcgtgcggccaggctcctcgcaccgctgactcagctcgaggaggctttcttccgaagcgagtgactgcagggccacgcgaaggcgtcagcttcaggtcaaggtgtggaaggcatcaacggcttggacgaacaaggatgacaaggcggcctgcccagtcggcttgcgtctgagcatgggcgatagcggcttcgaagcggtacatccagacgctctgcttgcgctcgtcggacccgatcgacgtgtgctggatgagctgtggtcgtgcgagctgatcagctcggatcaccagtcaaaaggcccgcttgcgtacctttgagcctgctagcagctcggatcccagcgggccgctgatgtcgagatgcacgagcggagcgctctcggccaggacgaccttgtgccaatgggcaggagcgaaggctgtcgacgagaagggaggtcagacagttgcagatctgacaatctcgagtggcaggactcaccaaagctgtcgaaatagggcggaatctcgccaatcatcgagtacgtgtagtcgaggtcaatgctgcaaggaacgggtcggtcagcgaaggcgtcagcaagctcaaagatggccgttaatcacaggtagtggccatcccagacgaggcatcctgcggaaaaaagctggtcagccgcggtttaatttgacagagatcaaaatgatgtgacctaccggcattcgaccgcgagtctttgacagcggcattccagacgacgtcgcctaactggaggtgcgtccagatgctggcaatccgcaactctgtagaatgcctcatagtcagcacgagctctactcgacagagcagcctgtcaagacccaccggtctcgcactggacgatgcagccgtcgctgagccacgcgctgcctggattggggacgaagcagcgcagacgggcggcgcgatctgggtcgggccgctcgtgtagtcagcggttgatcggggttcgactgcgagtccgggtcgccactcacgagggcttttcagaacctgctgccccgcactacctggacctgcgtcttttgccgttacctgcgccctgagacgcaactgcaaccatgaggagacagaagaggttcagcatcagctcagcaggaggctacaacgctcgcaagtcgagagactgaccaggactcgagtgcagctgcggcaaatagctgcgaacgttgacggtgcttcgtctccaccttcggcgacagttgcttgggctcggagcgaaaatgactcctccgaaaagcgctttgcgagaagaaaggcgtgcagatcctgcgcagaggggtcgagatgtcagatcagacaatgcccaataatcagctgacggaggaagactgacggcgagcgtgaggtgaatgggctcggctccccactccgggcgccaggagcggtagcctacctggccaaggtaacgttggaggatggcctccttgacaagctcgtcgcgctcaggaaggcaccggatctcggatgccgagttgttgagggcgacccagtcggcgtaatcgagatgggtaaggagtgggccgaggacgagtgggttggcgagctgtcggaaagcagcagtatctgcaaaggtcgatctgtggcttgggaacagcttaccagagggcgagggagttagaagaggcgttgcgtgcctgggcgggtccgtcaagtcggccggatgaagtcgtgctcgagtagagggtgcagtccagtgctgcattcgaaagacgacaggtgtcgaggccggtgtcagcagctcatcgaccgatccggcgggtgaggctgtcgccagccccggagcactctctcgttgaggctgttgcgagagagatgatacagtcttcagcgctcgaggacccgtcacagtctggaggggagggatggagcgtacgacatctggcctttttggcagcaggtcccgaagcttgaacggcggcgcaggcgcagcgacggtcggcagatacgagaggcggttgacctggcctcgcccgcccattccagaggccggctcgagaaggttggactccgtctcttcgtcgtcgttgccgtcgaggagcgagaagatggacgacgagagcgagctgctgcgcgagcgggcatggaagggcgaagatgcccgctatacgacggtctctgggcgtcagctgcgcgcgttggaggcgtggaggacgagggctcacgtcgaaggagtcttgtcggtgtagactgccgaatcgaagagagccgctgctttccttccggagcttgccgactgctgagagctgctccgtcagagaaagggtgataggaacggtcagccgcgagcgcgaacaacgatcgagacagcagcgacgcacgtcctccgtcgaccgaccggcgcttttggcgagatgggtcaagcgcgagatgatcctcgacgtcttgctctccttgagcggggcgccgtcgtcagccctcggctcctcaatactgataatctgggacgcgggcgaggcgagcgggcgtaggtaaggcgacatgggcggcgtcgcgctcggcgggcgtccgagtgacgtttcggaagcttgggcatcaagcatctcgggagaagggtcgtacgggctggcaaggagcgctgcggacgaggcttcgagcgaggaggctgctccagacaaggccgcgtccgcccacggcttgatcgagacacgacgtgcgttgccgttggtcggaaggactggcgccgatggtcggtgatgaggatcgttcgtcctcgacaacgtcgaccagagccctgttgacgatgactgggacgggccgtcatacgcacggaaggtcgactctggtcggccggtcgcgtagtacgcgaggccaaaattcaagccgccagccatgctctggcgaggggttgtgtcggccttgatggttgtcgctccgctgctagcgatcgagagaggtcgttcggagggcggccggcgattggtgccttcgagatgagtactcgatggcggggcgagcgatccattccgaggcttcggtagacgagcgcgcagagtgactgccttgccggcctcgtcgaaggagtcccgccgctcgtccgaagacggtatgtgaggcagattcctgtcttctcgtgcaaggtcggtcatcgaggtttgaggtgagaaggaagatgggagaggggttgcagttggaccggctgagtctgcgagcgacgctacagcgtcctggcttgtaagcgcgccgacaccggcgccgaacgctgcgagaggactccacttcttgcgaggcaaaggaccaggcaggaggacgtcgccgagacttgaggcatcgggcgagatgatgggcgacgagctgaacggggcatgtggcggcgagccgggtccgtcggccggcgaacggccccgcgagacaactgcgtcgtgcgctcgcttccacgcgaccggcgcgtcaagcggcggcgacgaggagctcttggacggcagcgccagcgatgaatatggcccgcctgcgcttgccggctcggacgtgctgcgctgcgagctggacgaggacgccgacgagacgggtggcgggcggcaaggaggagccgggaggggtagaccgtggatgacctttggtggcgacggcattgggggtgtcggaggccgagggaggatgactgggagcgctgctcgggccggcagtctacccccgctcgggccgccgtcctcagccttgcgccgtcgggggcgagcggcgaccgtcatcgtcgtctccttcggagcggagggtacggcggacgacgtcgtctggtgagcagcagaggatgagtcggctacagagttgccggtagaaggaggagccttatcttgcagccgacctgacgacgccgacggggacaagatggcgctctcgcaccgcctgtcgccgttggagctcattgccgggagggtagcctgcgaaggatcgtcgacatgcttcagcgagcgtcctttgtgttcgaagcggagagaagaaagggtacggaccgactggctcgtgctagagtcgctgctgaaggaaggcgagcgggcgaacatggcgaagatgcgcggcggcgggtcggctggcggggcgagcagcgagtcggtcgacgggctgccgacgccgagctgggcagctatcgcgcatttggctcgcgatgccagaggaggtgaaagggttggctggctgccggttgccgacgagctgctgccttccctctgaggctggcgaggcctggtcgtcgcgggcgtggcgcgagcagacgacgacgcggacgacggcgaggtaggccgctgctgccgctgctgcttgacattgtccttggacttgcggccgaagagtcgcatcgctggcgaggaggtaggccaagattgggaatgaagaggtcgtggtaagagggaagggcgggcgcgcgagcgagccgatgaagggtcgacgcgccagcttacttgcccctttctcgctcgggcctgaaacaaccgaccctcgtccggcctatgcgtcgactttggcctccttctgctaccctacttctcgcccacccccttgggaacgcacactctgcgcagggtcgacctcaggatgaacgccgggcaccgctccctctgtcgctctacaaaaagattctgctctgcagcctgtccagatccacctcctcccgctcacgccctccgcgcacaaagcgtttcgtcgaagacaagccatgatcaattctcccaaacactcgacttaacgagtgaatgggtctgacgcacgacgtttagtcgaagagtccgaagcccatgtcgtcgtcggactcctccttgtcctcaaccttctcctccttcttctcctcggcggcggccggggcggcaccggcagcggccggggcagcgcccgacgaggcaccacccgaggggaccgaagcgagcttggccgagccctcagagatgaggctgaaaagggcaaggtccagagcagggtcagcaagcgcacacaaccagcgcagagcggcgagtcgggcctcacgtgttgacgtccttgccctcgagctcagagatcagcgaggcgaggcgctcgtcgtcggcggtgatgtcgaccgaggccaggacggccttgacgtcctcagccgagggcgaggcctaagcagcggcggcggatagggagagcgagcgtcagtcgagctgcgctgattacaacaggctgggcagggcgtggctgctggggttgcctggcaacctagacgcgagcggtcggcggccaaggtccaggtcgggcgacgtccgaagagcagcagctgcggctgggtgtgacctcgcccgacctcaggccgcctgcctgccaagcgccgcgccctacaggtaaaggttggacctacgtttccaccctggacgaggagaaggtaggcggcgatgtgcttcattctggagagtcgggagaaggaagggtgacgggtggaagtcagcccttgagcccaaagccaagttcgttcggatgcgcgcgccgcggccgccgcgcgcagagcagcagcaagccagctgcgggcttcggaaggacgcactttggcttggggtttggcgggttacaatcgatttaagccggaggcggactgtagacacgaagccctacgagccgaggagagagggatcagcctgcctgccctgcgtgtgtcgtgccgcctgcgagtagaaacgcacgaggatgatgctgagggaagcggagaagacggctgactctgcaaaggcgagcctgcggcgggcaagcagttccgaggctggcgtccaggccctcgaggctggtatcaaatctagacagccgtttggcagtggaccgaccctggtcgacagtttgagttgaagcccgagttgcgcttttgccccgacgtctttggaccgcgccgagcctcgcccccagtcgttcgcaggtcgcgcgtcgcccagcctgaccctctcgtgcagcgactccttatcgaacgtacgtccccaggtagcgctactcggtcagcgcacgcagcggatagcgccgaacgaggagccgacgctaacatcctgcttgccccctgtttcctcccgtcctgacgctgcctcggacgctgcgtcgacgtgctgtcgacctcggaccgacctcgtgctgctcgctcctgcgctgcaccctctgctccgcctgccgctccatccgcctcgtttcggaccggtccctccgcctgcccgctgctcgtcccgcgccgccgctccctgcggctgctcgcgctgctcctctcgccgttgccctactgctcgtcgcacgcgcgcacctctcctgctccctcccggccgcaccggccctctcccaacacagtccttcaagatggccgactctgagatcaccgacgccaacaccgccgccgccctcaaggctaagcgctcgttccgcaagttctcgtaccgcggtatcgagcttgacgccctcctggacctctcaaacgagcaggtcagtctgccaaccaagcaggctcgggcggtcatgggcggcatcggggggtggcgagggagcaaagagcgggcgggcagcagggcgcgagcagctttgggaggtcgagcggcttgctgtgacgagcgcttgagcttgctcggcacctcgaggttgctcgcggcggcctgctgtgacgcctgctgcttcggaagacgcgcgaggaggcatgccaccctgcgactcgtggccggaactctcgccgcacactgtcggccaggtgtgctgactacgtcatccgttacttcccgcagttcatggagctcgtccacgcccgggcccgccgtcgtttccagcgcggactcaagcgccgccccatgggcctcatcaagaagctccgcaaggccaagaaggagtgcctgcccaacgagaagccggcggtcgtcaagacgcacctccgcgacatgctcgtcgtccccgagatgatcggctccgtcattggcatctacaacggcaaggtgcgtcgccctgcacaacccccgcatcaaggcgcctcaagctgacccttacccgcttcccgtgctcgcagaccttcaacactgttgagatcaagcccgagatgactggccactaccttggcgagttctcgatgacgtgcgtatcaccctttctctgccgacctacgtgtcgccttggtcgctcccccttgctgcgaaaggccaccaaaatgctgacacccgtgctcccaacgtcgcctgctggtggtgatcgtgtgcttgcctgctgctgctgttgctttttgcgacgctcagttacaagcccgtccgccacggacgtgccggttcgggctcgaccaaccacgcccgttacgtccccctcaagtaaagcgcgtgtcgtggtagagttgcaaagccaggctggtgggttgggatgcaatcaccatggtcctcctccatcttccttccgcgtccgccttgtcgagggggtcacgccgtctagcgtttcggcggtcgatgtcctgaagtgcgaggggagcttgcgaacggacagcaagagcgggaagaggtctggacgtgtgcacccagtgcggatgacgacgacaagcagcgacggatgctctttagtcgtcattgcctggcggccgacagctgcgacggccgacactgcaagctcgtgcgcgtcgtcgtcaccacccaggagcagcagcgtcgcaagtgacaagctccgccagtcgccaccctcgcaagagatcgactagattgtgcaagagacaagattgaaatccacgcagagcgccagacagggcttgtagccagagagatctggtggacagcccgctcgacggcggagacgccgcctgatgatcacccccctggccgagattggctctcgcgacagctagcgacccaggcggcacgatgaacggaaggagggcggaccctctccccgccagcctatccgagttattaagagcgctcggttttgttgttgttgtaaggggagaaggaggaggtcgcaccctcgacttttatttgaagcggcggtggcggcgcccaacttgcgactgcgagagacggagcttcggcttcgggcgacaacgcgccagcttccgcccttccgccaggccagttcgaccttggcgaccgaccgaccacaactcagcctcccaaacatgtcgctttcaccgctctgtagcagtctcgtacgtcgatccgatcagcttcacctgtcttggagctcgacgctgaccgtagcggcctgtacctcgctcctcgcgcgcgcacatccagctccgatgtgcccgggcatcgtcctcgaccctgccctcgcgtcggcctctctccctcgccgcctcgtccgccctccgatcaaggagcaggcaggcatcgacgccctcgtccctctttgctcactcgacctggcccgctggcccgagcccagcagccgcaggacgccggctcttcgccgctccgccgccgccgtcgccggcagcagcagcagcagcttcggctgagcaggctggccggctgacggctgagcaggcccggcatcggctcgcgtatgcaaagagcatgcaagatcgttactacaagaagaacaagggccaggcggcgaccatcggaatgtacatgacggccgtcgtgcgtcttccttctctcccgatcatcgatcgaggactgcgcgccgcccctcccaccactttcgcacccaggccgctgaccaccctccctcttctgccgctcgccaggtcctcgtcatggtcggcgcatcatatgctgccgtccctctctatcgtgccttctgcggtgcgacgggatttgctggtatcccggtgacggagaagtcccggatggacccggtcaagctcgtgccgacgtcgtctgaccggcggatcaccgtccacttcaacgcgtcgacgagcgacgtcctgccttgggacttcaagccggcccagacgaccgtcaccgtccggccgggcgagacggcgctcgccttctacacggcgaaaaactggggcgatgaggacattgttggcattagcacctacaacgtacgtatcgcttcctcatgtggtccctctcacaacccgcgttggggctgacttcctggcccccgctactcaggtcgttcccggcatcatcgctccctactttgccaaggtcgagtgcttttgcttcgaggagcagcggatcctcgccggcgaggagctcgacctgcccgtcttcttcttcctcgaccgagaccttctcgagtgggtgccctctgcttcctgcgggcctcatctcacgaaactggcgttctaacaagcttgctcttcccctcccgcagcgacccgcagatggacacgatcgacaacgtcgtcctcaactacacattcttcaaggcccgtcgcaaccagcagggccacgccgtcccggacgcggctaagaacgtcgttgacaaggcgagcggctgggaggagtacgaggacgcgccgctcgtcgccgaccggggcgcgacgccgagcgctgtgcccaagccggccaaagcgtaatctcgatgacgctttcgcagagctcgctcggtcccaactcgggctgcacatcctcggctgatgtgcggcggcctaggcctagtttcacagtcatttctagggggcaaggcgagaggcagacccagctcgctcaggccatgagcttcttgacgatctcgtcggtgacctcctgcgtcttggccgtgccgcgcttgccagcgttgtcaaacaggtcgggcgtgaggtactggccctcggcaaggacggcatcgacggcgccgtagatgcgggcggcggcgttggtgtagccgagatgcgagagcatgagggccgccgaccggatcgaggcgatggggttggccttgccctggccctcgatgtcgggtgccgagccgtggacgggctcaccgaggatgaacgagtcggacgcgttgaccgacgggacgaggccgagcgagccgacgagggcggcagcaccgtcactgacgacgtgagcgaggggcagatgagagcagcgtcagccaggtgcagccagggcagcttgatgacggccggaagggacgcacgaaaggatgtcaccgtagaggttgggcgcgacggcaacgtcgaagtggtcgggctcgcggaacatcttgtaaaccatcgagtcgacgagctgctcctcgagccggacgtccttccagcggtcgccgccagccgtgtgggcggcgcggacggcctcgcggaagaggccgtccgagagcgagaggacgttgctcttgtggacgatcgtaacgagcgccttgtccttgtggtgcgacgactctgggttgagcgagcgctcgagcgcacggagccgggcaacctcgtacgccatccggccgatcttggtcgacgcgttttccgaaatctgccgccgggcaatcacgtacttaccgcgaacgtcctcggccgggtactccttctccgacttgatgtactagatgggaaggacagcagtgcgaggtcgtcaggacagctgaaggcggacgcacgcgcgcagcgacaagcgcgccaagaccggccgggagggacggacgaggcactcggtgttctcgcggacgatgaccatgtcgatcggcttgcccggggcgccaaagacctgcaggatgggaactcgacgaaggtcagccacccagttgtgcgaagcctctcagcggccgacgcaccgacttgaccgggcggatattggcgtagaggtcgaggtgcttgcggagcgcgacgatgggcgacgagtagccggcgaccttgttcgagggcgagctgttggagaagagacgtcagtctgaaggaggctcgcaccctttccttgctttgacagcgacgcacctgacgctgccgaacatgccggcgtcgcactccttgagcgcctcgaccgtgtcctgcgggagcgcgacgcctgtcttctggaagacctcccagccggcgagcaggggcacaaactcgggccgggggatggccgagccgagagcgagaaggaccttctcagcggcgggcaggacctccttgcctgaagatggcggcggcggcaagagcaaggcagaaagataacgagggcatgtcaggacggaggtcagacgaggtcaatcagccgctgcccgtcggcggcgtctgcgaggactgaccgataccgtcggcagggatcatgcccagcttgagagtggtgcgcgcgacaggagtagacatcttttgtgagaggtaaagggcagaagaggagctggagagggagtgttggagggtcgtcgacggcaaaggggtcgtcggcgcggcagacgcgaaggcgtcagcgcaggcggcgctatcggccgaagcttcggcgcctgtgatgctcaccagaatgggttaaggcaagggccggggcgtctttcagatgagagcaggcggcggggtgaggaagttcacgcgctctcctgacctcgaaagacgatgagaaaaatgtaacatgagagatcaagcaaggcagggtgaccagcggaacgtgcataaggcagtcgggcagccagatgctcgcgtatgcgcaggccagcaggacacgtaacgacctggcaagatgcgacgcccaagaccagacgaagaaggcgagaggagaagagtctgggagcgaaccaggatcaagggtcagcgacgtgatcgacggtgaggcagaccagaaggaagaaagagggtgaaggttgggatcagaaggaaggcaggattggaggtccacattgttccccttttggggctttgttgcgcaacgctcggacgtacgtatccacttcgcatcatatgtatgaagggaggaggggttgtgggttgagaggaggaagaggcggtgagagagaactcactgatggaggacaaggccgagctcgccgtcgcgcgccggtaagctagtgcagagcagacgacgcctagggcatggcaagggcaagcgagcaatcagtagaaaacgggacaaggcgaaggcatgatggttggaagggacgagtcgaggtcgacaagtcggagcgacgagaaggcgaacgaaaagtcgttgccagggcgccgtcactgaggcccgcctagcaaccaccgcgaggctcgcatggcaggcgaacgggaccgccgaagagaggccaccaagctcgcctggttccagcttcgggtctagacagaagacaaggtctggcgctgctcagtctgattgctttctgcgacgtaggagatcagcaagagaaagccagcccgggctgccggtcgagccgctgcgggctggaccggcgcggccgccgtgccagcgcgacttcgccctgcgtcccgaggctggtcagccatcaccctccattccagcttctctgccctgcctcccgatagcactcacctagtccgcccgagactcgccatggacgaccaggaggcacgctgcctcgatattgcgcgcgccaagctcgccgcgggcgactatgctggcgccaagcgcttcacgcagaaggccatcggcatgagcgagagcaaggcggcgtacgccttgcttgaggaagtcgagaaggtgcgtctgacgtctcgtcgcctcccgagagcgttctgggcaatggtgtgggtacgccctgctgactcgctgcgtgtccgcctcgactcgtgttctcaggccgagcggtcagctccttccggctcgaagccagcgccgtcttcgaccccctcgtcctcagcgacctcggcccgggctaagtcggcctcggccgcgacgaccaagtcacggacggccgcgccagagccggcgagcgagaagcgcgagtacacggccgagcaagtctcggtcgtcaagcgcgtcaagggctgcaaagtgaccgaatactacgagatcctgagcggtgagtcgctttccttctatccgacggctcaggctgcgagtcacggtgcgaaggcgagctgacaaccggtcgcctcctcacagtcgagcggacctgtaccgagggcgaagtcaagaaggcctaccgtaaggtgagtctaagccacctgccgccctgcttcgcaactgggcgcgctcgaccttgcgacgtctagctcacccgactcacgtcccgcagctcgccctcgcgctccatcctgacaagaacggcgcaccgggcgcagatgaggcgttcaaaagtgcgtcccgctcgaggtcggtccgagaattgcgagcagctgctgaccggtcctgcgctcctccgcctgacggccacagtggtctcaaaggcgtttcagatcctctcggacggcgacaaaagggctgtctacgaccgctcgggcggtgatcccgactcgcgcgcgtccatggcgagcagcggggccggaatgcgcggcttcggaggcggaggcagccagttccggggcggtggctttggcggcggcgaggttaacccagaggacctcttcaacgctttcttcggcggtggcggcggcgggtttggtcagggcgcgcagagtacgtcgctgtctcctggctgcgggttgaacgcagacaaggccaaacgcctaaccttatctctcctctagcctttcacttctcgaacggcggcttccggacggccaacttcggcaaccagcagcggcgggctcgaccgcaggcggccgagagcgacgcctcgatctgggttcagctcgcgccgatgctcgtcctcctcttcttttcgctcctctcgttcctcccgtcgatcctcaacccgccgacgccgccgccggcgttccagttcgaatcaagcgcagccttcccgacgcagcgcttaacgtcgctgcaccaggtgccttactacgtctcgccggcctttgactcgcatccaattggcgagtcgattccggtcaagcataaggccgaccggcaggccgcgcgctacagtcccgaactgcgggcgtgggagaaggagatcgaggccgagaagattcgcgagctccagggccggtgccggtgggagatgcagaaccgggagcgcaacctcgaggccaagcgcggcttcctcggcatcggtgccgactgggacgagattcgccggtacgtcgctcatggcggccacggcagctctctcatccgctgactctcgagcgccggcctgccttactcgactcaataggatccaggctttgacgctcgaaaactgcgaggcgctcaagaagttcaacgtcccgaggcagcagcaattcaactactattagaggcgcgagctttgccgagatcatgatttgatgcccccacgtcttgacgcacgtcttgacgcacgtctgcttgcgtccgtgctgatcctgaagtgaaggagagatggaggcttgcaccaggaacggaggcttgtctgagagaccaaacctgtagaactggctgcctttaagggggaatgtaggaccaggatagttatgttaggtcgggcggggctaaggtgtgggtttacagaaggtcgggagcttagatcaggatcattagggacatttgtggcttgtccgatagtagtcgtttctttgtgaggttgcaggcaggtggtgcgttcgtagctgacattcttgccgcgacttgatagttagaatattatgtatacaaggcactttcatgcacattaagtccgtttaccgaacggtcaacagcgttccaatagtgtttctgatcgagacactgtagtcgttgcgcgttcgcagatcattctggagaggccggttcgattccggcatcgacctcaacctctcggttgattagtatatcggccagtacgccagattctgactacgacttagtttttgcctgacgggcatgcactggcttttttcacctgcgtgatttgaggttttgtttttagctgccatttcgcctcagagccgaccaagctatacgagccatacaggacctagtgaagcacacattgagcgccgctcgaggtggacgggaggaaaatgggcgtgaggaagtcacgctgagccgtgtcgcgtgtcagggcccgatggctcgttctctaactttggcagctgccctgtgacatcaacagtgctttagagcttctcctctccacagaatactggaaaaggtcctaagggtgtatctgccaagtctgatctagctagcgaaggtcaaagaagaagggtcacattgtctgcgcgccagccccggcgcgagctgagtcgcgcagcgcccgaagatcccgatttcgactgaccgacagctgtgctcctcacagaccggcaagagtcgagatctaaagccgagtacaaaggtgagatcctagtgagtgagacttgaggatctcaaagcgacagctccctgcgttcatataaggcgagctggaaacttggctgtaacctccgagggaaatgcgccgctcgctctctgcgctttgccagtctaatcccgagcccactcccgctgaccagtctcggaacgagacatgcatgcaggagttatacagggccggatgacgggcagcaggcggcagtgctcactcgggcacagcgcggtagatgacgacgtcgccagacttgaggtcctccagacggtaggaggccgtctccagcgtcgggtgtgcgttggccttgctcgcggcctgggcgacgtgcagcttgcccttcttgtgctcaaagtcgaggacaataccgtggccctgctcgacatgctgctcgtaaggcaccaggcccttcttgcccttaaagtggcagtctgcctgagcgaccgcagcagatcggttagcgctcacgatatctctagccaagggtgaaggggacgtaccagctcgatcacatcgcccggctggatgtcgtcgcgacgctcccggacggtgccattggactggcggaagatcgagatgcctccgtcgtcaaagggccggcagtgcgacatctgcagcgtctcctgaacgaagccgagcgacgtgccgtcctagaggtgaaagcgcgacttagtcaatccggggcggtcgccagttcagcagcggaaggaacgacactcacggcgatgtaggccttcttggactgggtgagcagcgtttgggcgttgcgcaagacaaggctgccagtctgtcggctaagagtctgcaactcggtgtggccgcctgcgctcgtcggcgtctgggccgactcgcgcctggctggcggtgcctgggccgactcgcgtcgtgccggcgacggaatcgtcggcgagccttgctgagcgtagtcgtcaccaacggctggcgagcgcaggtcaaccgagggcgagcgcgtcttgaacatctccgagatgcgcttggtcgatgaccggcgggccgtcggcgattctggcgtcggacgcgatggagagctcggcagggcgcgcgacggcgaggcaggggtgccgacagccggcgacgccatataggccgcctggccaccggacatgtcggtgtcgatgacaggtaaaagcgggccgcgcgacggccggggaggcggcggtggtgcgtcctcgtccggctctgggatgttgacagcgaccgcaggcggcggaaagttggcgcgggccgactcataatcgatgacgtcctcctcctgcgcctggggtggcggcggaggaggcaacgtcgatggcttccgcggcggcggaggcggcggcggcatgtcgtcctcgtcgtcgaccgagtcctcagcaatgttgggctcggcctcggcaggctcgtcgtcctcgaggccggtctccggcgtctcgtcctgatcatccgcttcgtctggcgcactaaccggcgcctcagtcgtctgagtgggcttggcgtccgcctccgtctcggcgacgggctcctcggcagctggtggggctggtactggcatcgacggcgcgggcgcaccgaacatgcccatgccgcgcgcgccaatggcggccatgcgagccctgactcgcgcccggcgcgcctcgtcgtcgtcgtcgtcgtcggccgtagtctcggcgattggtgcgggcgctcctccaagagtattggctgtaacgggcgacgcggcgtcgacaggatcggacgagatcgaccgcttgggctgaaggatcgggggcggaccgccaaacgctcggacaccgccaagcttggccatgcgtgccgcgatggtctgtcggcgagcgacctcggcgtcctcctcgttcggcccatcgtcgacagacttgttttcgtcagtcgtggcagcagcagcagccgggacagcgggcagatctgtggcctctgacagagcaggagcagggaaggtcggctcggccttttcctctgcagccggggtcataattcggggcgcaggcacgacgggcatgagcgaggctcgcttgaccggcgctggcgtgctggcgacagacgcctcggggtccgcagacggtgacggaggcggaggcgggcgagcgggtggagcagctgttccgagcaatcgaaaaggcacctaagttagcgcagctttacgaggaagcagccgcaagaacacgacggcgcacgaggaggagcatcggtgtcggtgtcgtcgtcttcagcatcggccgcctcttcggcatcggttccaggctcattgacgtaagccgcctcggcaggaggcggaggcggcggaggtagggtcgttctcggcggtggcggcggcgcgacctcctcgggtgcatctgaggtcgtgagagggtggagcgatgagcagtcgaacgagtgaccaaccgtggcctcgactgaccagcgtgggcgatgacgccgacctcctcctgctcgtccaagccctcctcctcggtgacagcgccttcctcctcgagctcctcctcaccctcgaaagacgactcggccggagcgacagacgccgcggcagcgacgggcggtgtcggcaggcttcttggcggaggtcgggttggaggcgcaggcggctcgtcaaagtcgtcggcgtaatcgtcgtcctccccagaagagtcggcggcatgtgccgcagcagttggaggcggcagcgggaggctcgaccgagggtgcggctggggcggcggcacgtcggactcatcatcctgcgcgtcttgcggctcttgccggatgtcgtcggactcgttgtcgtgagcttcatgcatcggagaagaagcgggaggtcaacgagatgtcagaaggcgttacaatcgggtttgcggcatgagggtggcacaggagagtcgtgaagtaggggcgccagcaacggctgagatcggagcgagagagtggatcaggagcagagggccgtacccttctccttgtcttcgacctcttcaggggcggccggaccagcagcagagatcggcgggagagggacgatgccgccgtccttcgggaacggtgtgtcggcggccagctcctctttcttgctctgctcggctttgtcgtcgttgtcagtgtcgacgcctttgagctcggacgtctgcgtctcgggcgacaagaaatcgtcacgcgggccgagcgccgagggcgtgtcgatggccgttcgaaactcggccgtgtcctcatggtgggacgactcgcgctcgggaagaggaatcgaggtccgatgctgaggcgcatgagcccgggcgtcagcctcggccgagacgggcgcgtcgacgtccgagacggcctcctcgtccggctcggcgacgagcgagcgctccttgtgagcgaccgtgggcgagacgtgcgagagctcagcctgagcgggctccgacgtcggcacgtcagatccttgagaagccgatggcttgaccggagactggacgagcagttggtcgaccgcctgctgggcaggctttccgacaggcgcgagcgcgatgccagcttgctgagcgccttcgacgccattctcgccctgaccgagctgttcgagccgcttctcctcggcgagctgctcggccgtccgggggatcggcacctcgtccgggttcggcgcatacgggaccgggtgctcggaggccgactcggcggcaggagacttggacgctgcgtccgaggcagaggccttgggcgtcggctgcttgcgacgcggaggagcagcccgctttggcatgaccagcaagcccggcgcagaggggacgaccgaagcatcctcggccggtgccgcagtttcggtgggcttctcctcgaccttcttgatgtagacgggaggcattgcggcagcaggctcgtccttggccgcaggaggctcccatgcctccggctttggctcggataacggctggcggtgcgcagcaggcttgggcgcaagcaccgggggcgcaaacatgcctcggccgccgagcttggccatacgagcggcgatggcggccctggggcgacaaagggttggcgaaggttagtcaaagtgacgaagagcagtctctgttcgggaaatgcgcacctgcgggccttctcggccgcggcctcgtcctcctcctcaggctcttcgggagcagcgtcggcagtagactcggtagccttgccctcgttcctctcggtcgaaggctcgtccgcctcggtcgcagctgccggaccatcatccggaacgacgtcagccttgtcgccctcggcctcggccgcctggacctcgtcaccagcaagaacaaccggtcgctcctcgagcggcgtctcctcaaccttccacttcatctccttcttggccggtgcctcggccgcgacagggacaaccggcgcctcgggccgcttccagacgcgcggcttgcccgagacgggcggcggaggaggcggggcagcgccggcggcgcccatctggccttggagagcggccatgcgctccttgagcgagcctccagacttgatggacgactgagcgtccgcggccgagaaggcagcgttgcgggccgggctggcagcaggtgctggcgaggaggcaggagcggcagacggagcggtggactcgctgaattctgtggtcgaagactcggccgcaccggacgaggcagcagcagcgggaggggcggcgtcgccagaagcagcagcggccttgttcttccacgcccagcttcctgacccggccggcttattgcgcggcacaggcggcggcgggccggccgaagcagcggccgactgctgcttgaacatggccatccgctccttgagcgagccgccagccttgatcgagtcgcgcgcgtccgaagccgacatgccgccgaccttgactgcgctgggcgatgggggcggagcagcgccggccggcttctccgaagcgacagcgatgggcgcggctttcggcgagagagaagaggcagcgacggcgactggagcagcgatcggcgccgggtcttcgtcggacggtgccggcggcgagaccttcttcgcgtcctcgttgacgacgtcctttggcggcgcccggtcggccgcagccgtcgacgccgtcgtagtcgcagcggccgcggccgccatcggagtttccgtcggcagagaagccgcgacagcgacgggcgacatgacgtctggaagcgagttgacagggatcgagcctgaccggttcggcagcgacgttggtgggatcgcgatgggcgctgccgaggaggcgagttcgctcgcctgagccggatcatctccggcagctggaaccgacgcagaagcctcgtcgagcgggacgacaaactcctgcaggtcggtcggagcaggaggagggaagaagataaaaggtccgtcagcctcagccatcgctcgtcatgcgccggtcgacctgcgcatgggcctcgctccctggcccttggtgcaaacaccctccctctggttgccctggatcgaaaagagacgcaccttcgggaacgtgccctttgcaccctcggcgttctccccctcgtacgtcgcgtccgggtcgtcggtggccgggccgaggaccgtcaggcggtcgccctcgtcaaacgagagctcgggtgaggcccatcggaggctagcggaggaaggacgagacggcagatcagccgccgctgtgacctaatacaggactcactgagcgcaggactgacatggctttggcctcgaagggaaagttggccatgaatgttgtgtcttgaggagaaggcgggccggtggtgattgaggagcaggaggttggggaggcccggcccgccatctcgcccggccaaagcgaaggccgcgcgcccgcgcagcaggcccagcgacgtcagtctcctggctgctcccgccaagaagacctctcgctcagccgaccgaccaccaccactgccaccgatacctacccccaaacagaccagaactcacagacccttgattagcagccagaacagaagccatgggtgagtctaccatctcacggtgaaagcctccgtcttctcgaacgggaggtcgcctcggagagcctggcctggagccagcgcctcagccattgctcggcggtcgctcacccgcccacctggctggccagacgatggccgccttgtagtctgacttcgctcgcttcggtcctcgggtaccggcgtgtctactttactgggtcgctcgagctgggaggatgggtctgaggaagcgggcccgagaccaaccggctgacctggctgtcactccgctcttgccacccttcggcagcctgcattcccatcctgtgagctttcacgcatcgtgctcgaaatgagaagcatccgagctgacgccgaccccttgtcgacccttctcttagcctcggctgctcgaccaaaatcacggccgagcacggcgacaacccgccccggatctgcgcgcgctgccacaacgcctcggtcgcaaaggcaaagtcgcgcacctggttcgaggcgttttgcatcccgctctttcccatctcgagctcgcacatttacaagtgctcgatctgcggctgggagatcaagcaggacaagggcttcgagccgccgatcgccggccagcagccgcagcagaggtgcgtcctgtgtcgtccctcgcctcagtcttgaggctgacagtcgccgtctcgctctcgctcatacagcttcggacccggtggcggaggctacccacccaatcaaggcatgccgtatccacccggcggtcaaggcatgcagaagccaggcgttcattgagtgagcgggagagtgacgccgccaggcgtagcgtgcgcggagtgttgaaggccgcgattgaacgggagcgagggaaagatgtcgagcgcgtatctgttgtgctaccaatgatctttgagcctctgttgtgctggactgccgtttgaggtgacgtcgacccctgccgccttgctgcggcccgtcgacgcgcgaactcgagccgtcgacgcctccgccgctcgacagccaaccacgttcctcgtccagccagctgtctcctccttcttcagtgccttacaagccgatttctgctctgtacgagaagttcgcttctgtgctagcagacctctgcctgaccacgcctcggagggcatgacggcggccgacagcggcgaggccgacgaggcgcagccttcgtccgacaaggtgcgcccgatctgcctccttacctcttgctctagcagctgacccacacgaatgaaacatgactagacagccaggttaccttcgactgaggtccgacaagccgagcagccggggccgagccgctcgccgacgcccgctcccttcgcgctcacgcccctggcgagcgtcgccgggccctcgacaaccctcctgtcgccgcctgctggcagccccgacgcagaagactcagtcaagcccgcggcgtccgcccggtcgctgggctcgttcggccggcgctcgcggccaaaatcgacgacgtcgtcctctcaggcttcgtcccagcagcagcagccgagacgctacccgaccccgttgccagcgaccgacggcgcggtagatgtgcgaaagaaccacgacgccctcttctcgttccacctgccacatccgacgacgaaggcgtcggctctcgctggcgagcgtgtcgagcttggaggggcggcgggacagatgccgacattccaggacgacgggctcctttcgccgccggccgaggtcgagggcaagagtcgggtgatggagctcgcgctcgtccgcatgacgtccaaggaaggtcgtacgtcgctctcgctgctcggttgatcttttgtacgagactgaatctgacgctgcggacccaatattcctcagccctgtgcgttaacatctagtcggcgaccagccttcgactgcgcagcacgtactgaccggctgcgactcgatcccttcagggacgcctacctccctcaatccggacccaacgccttctactcgcaggcctatcttccatcaaccatgccctacccgctcccagccgcctccctcctcgctgcgagcgccggtcagggctcggccctcccagcggcggcggccgaagaagacgtcgtcacgcgcgacgactatgaccggatcggcggccggacgggcgtcggctggatggcctgctgtgcgggcatgctcctctttacttgcacaggtgcgctctctcgtgcgatcgtgctaggctgctagagggctgacggtcgccctcgtcttgccggcagattgctgctgctgttgctgctagactcatacgtcggtctctggaacccacatctcgctcggctcgctcgtcctacattcgctctcggccgcacacgcgctgcctgactcccctgctcgacgccgttgaccgcaatacccccgtttgctgctcttgatacccgacctctccgcgatctgatgggctaccggcgtcgggctctgcggtctctcgatcgggaggcgtcgagtgagacgacggcacttcgtgtgagtcgaccgtcggtggcggcccctctctgcctgctgtcgcctgcccgcccctgagcatcctcagcgctcctcttcggtcagcgaaggtagacacctcgcacggagatcttgctcggctggcccgcggaaacaagcgcccggtctcgcatccgcagggaagcaagtaagacgtgcacatttgggcggtccgggacgagttcgcagggcggagggtaccgcatggagtggatcatgacagaggggctcaaaagagaaggatgacgaggtgcgtcttagaaaggaaagtgaaaggggaccggagggacagtacgcccgcgcagaacgacttgacctcggcggcggcctgcttgcgggcggcgatctcgcggcgcttccgagtcgtcgtgacttggagaggcggagcggctgagcggataaaccacgtcagtctgtttaaggcaggggtacaagtagtactggagctggcggtgggttcgtatccgatgaggcaatgcagttcgtataagtctccgtgacgtaaaatctgaaaacctgcgacatgtagagatagatgagagggtgagtggcttgcatcaacactacggccagaacgggcaatcgcaccgttgcctcggtaggggtgcagagggcggcacactgcgctgctgtttttatcgtgttgctgagactgatgactcaattcccagtagctgagagcaagtcgcttcgcatcagtctgtagtcttcccgactcggtgagcgcatcggcctccgtactgcaggcttgtgccgccgcccggaccgccccttcgcggccgctcatcgcctcactcgacgcctctcgacaagcaggctgccgatagcccgtcgctcccttctgagcggccgtctcgcactgttggatcgcatgcgcatgggcatcgttttgagaagcggtggtgagtggcaggagggagtacaagagcggcggggtgggtgggttggatgagtgtgcttgcaagcggggctaggagacagtattagagagaaggtgggtgggggtgggtaggtcgctgccggtggccttcggacgagaggcgaggccgtgctcgagccaagtcgggtcgaggaggatgtggcagagccgaagtctaggcgcgggcaggagtgcatgggcaagtaaggagggaaggacgacggccagagaccgctttacttcttctcctcagccttctcgccagactcggcctcgggcgaggcctcggacgagccctccgcgtccttgcctgcctggtgaaccttcgagaagaggccgagcgaggcgttgaggagctcgtccttcttagccttgatggcctcggcctcgccctcgccctcctggcccttggcggcgagctccttgagctcgtcaatcagcttctggaccgtctcgacctcggccttgtcgagcttctccttgaattcctcgagcgacttctgcgtgtcggagcaggtcgacgacgacgagaccgagatctcgataagctcgcgcttggccttgtcggcctcggcgtgcttctcggcctcctgaaccatggcctcaatctgcgagtccgacagacccgacgacgacgcaatcgtcatcgactggtccttgttggtcgccttgtccttggccgagacgttgacgatgccgtcggcatcaatgtcgaacgtgatctcgatctggggaatgcccttgtgggccgggggaatgcccgagagctggaagttgccgaggagcttgttgtcgcggaccatcgagcgctcgccctggtagaccttgacctcgatcgccgtctggccgtcggccgcggtcgaaaacgtctgcgacttcttggtcgggatcgtcgtgttgcgggggatcagggccgagaagacaccgccgagcgtctcgataccgagcgagagcggggtaacgtcgagcaggagaatgtcggtgacggagccggcgaggacaccggcctggatcgaagcaccgatcgcgacagcctcgtcagggttgacacccttcgaggggtcgcggccaaagacgcccttgacagtgtcgatgaccttaggcatgcgcgacatgccgccgacgaggatgacctcgccgacctcggaggccttgacgccagcgtccgagagcgccttcttgcagggctcgaccgtcttatcaatgagcccgccgacgagcttctcgaggtcggcccgcgtcatcttcttgttgatgtgcttggggcccgaggcgtcggccgtgatgtaagggaggttgatctcagtcgacgaggtcgatgagagctcaatcttggccttctcggccgcttcgcggatccgctgaatcgccatgcggtcgtcctggaggttggtgccgtactccttcttgaactcgtcgacgaggtgcttgacgaggacaatgtcaaagtcctcgccaccgaggtgggtgttgccgttggtcgacttgacctcaaagacgcccttctgcatctcgaggatcgagacgtcgaaggtaccgcctccgaggtcgtagacggcaatgaccgacgactcggacttctcgaggccgtaggcgagcgcggcagcggtcggctcgttgatgacacggaggacctcgaggccggcgatcgcgccggcgtcacgggtagcctgacgctgcgagtcgttgaagtaagcggggacggtgatgactatgaggaaggaaagagcgtcagccgtcgtcgccgcatgtaaggccggaagcaacgcagttggacggaccggcgtggttgaccttcttgccgaggaacgactcggccgtctcgcgcatcttctgaacgacggcggcaccaatctcggcgggcgagtacttcttgccctgggcctcaacccaggcgtcgccgttctcgggcgagggaacgagcttgtaaggaacattcttgatgtcgttctggacctcagcgtccttgaacttgcggccgatcagcctggaaggcggaggagagaaggaggcggtgatcagcaaaagagggagggcattgccgcgcttgcgggcgcgcgagctcgaaagaggaacgcaccgcttggtggcgaagagggtgttctccgggttgacgacggcctggcgcttagcgggctggccaatcaggcgctcgccgtccttggtgaaggcaacgactgagggcgtcgtccggccaccctcggcgttctcgaggacacgcggcgtcttgccgtccatgaccgagacgcaagagttagtcgtgccgaggtcgatgccgatgacggggcccgagaccttgccgttcgacatgggacgcgagagcatgggcgacatctgcgagcgaggaagagagagcgagagaagagtcagctcgtgaggcttccgatcggcgatgtgagcacaaagcagtacgcctcctcgcctcctccgcccgacttttttcgaggcggccggaggaaggaggtggcgacgagcgaggcagcccgagccctgcagctgagaagggggcacgcacgcggagagggagccgggaggacgatgcccgggcggagcgggagacggcggcgagcatgctggcagacgtatagggtgaataagaagagggtggtggtggtggttggtgggtgtcggtcggtgcgagaggagagcgtcgccgcatcggccgcccgcgcccgcccgcccgacactttgtcaatccgtcgagaaggatcgattacgcgacggcttgtaagagtaagtcacaccgcgcagcgtaacaggacccccgcctccgagcttcagccctccgccgccgtcgcctgcccctatctgccccgacctcacccttctctccagcccagccatgtccgcccctgctgcacctgcacccgccacctcgcccgtgccgacgatgatgtcgagcatcaagctcgcggccgacggctcgatcgagattgtcaaccagctcctgctgccgttcgtccccgctgcttcaagccgccgagcttgagcatgagttgacctgccgcggttgccgccacttcccgccgcagtcacgtcgtcgtctgggaaaaggtcgagacgatcgagcaggcctttgacgccatcaagtcgatgaaagtgcgctctggctacatcccctgggctctctgatccgacgacctccctcgctcgctgctcaccacgttcgcctcaccttcagatccgtggcgcacctgccctcgcctcactcgccgccctcgccctctcgcttgtgctcgcgtcggccctcactgcctcgccccggccggccttcctcggctcggccgaccttttcctcgcccacctcgccacgtcgacgagctacctgaacgacgcccggccgacggccgtcaacctcggcgaggccatgcgccggatggatgccatcggccgccaggcgatcgccaacggccaggacgtcgaggctgccgtccaggccgtcatcctcgccggtcgtgaagtccaggacgaggaccttgcgcgcaacatccggatggccgagctcggcgccgactggatcgcccgggcgacgggcaagacgtctggcctccggatcctaaccgtttgcaacacaggctcgctcgcgacctctggcatgggcaccgccctcggcgtcatcacccacctccaccagacggaccggctcgaccgggccttctacactcagacggcgccctaccaccagggctcgcgcctgaccgcactcgagctcctaacgctccagatcccggcgacgctcctcgccgataccatggtcggctcgctcttccagcaccacgcgattgacgccctcgtcgtcggcgcagatcgtgtcgcctctaacggcgacacggccaacaaggttgggacgtacaacgccgctgtcctcgcgcgcaggcacggcgtcaaggtcgtcattgtcgcgcccgagacgactgtcgacctcgacacggccaacggctcgctgtcagtcctcctccgcctcccctcctcgccaactccttactgaacccttcgtccctgctcgcagcatccccatcgagcagcggcccgccaaggagctctgcacgctctccggcaagctcctctcagtcaacggcgagccccagccgctcgacctcgcaaacgtcagcctcgcctcgatccagattacgccaaacggcgtcggctcgctcgactatgcccaatgctacaagtcagtcttcgccttcgcatctccgctttaatactcgcccgctgatttctaccccgattactgttcttgtcgacccctcagcccggccttcgacgtcacgccggcagagctcatcgatgccgtcgtcaccgagacgcgcgtcgtcgagaacgtcggcggcaagatcacgatggcgcgctcgtaaggcgaccgcaggattagattgcgctgtagattcggccggccttgggtgcgcgccctcatattggaagggacggtggcagatgagaggggacatgcatctagcgagagtgagcagggcgggtacgagaccgactggtggacagactcgagcgaaggcggcgaccacgaggacgggatgggcgaggatcgttaacggagcacgagagataagagggtatgcgagggaggggcagacggggcaatgggcggaggtggttgatacaagtgtagggagagcaggaagagaagcagaaagcagggcggccggacggggcagggccggcggctagaacgggacgctgcccatctcgcccgtcgcgaggaggtcgtcgtcaaacaagtctgggtcgtcctcgtctacgtcgtcgccctcagcatcatctgcacctttgctccccgacgcccggccgccctcctcatcgccgccggccaagccgccatccgcagcgttaaggtcgagctcgtcgaaccggtcggcgaaaaagtcagtatcaggcagcgagcccggcatcgagctcgcacgcgcgcgccgccgctcattctcgaccgccggcgagtgcgggttcgtccctgaagcgctggccgcgtcctcgtcctcctccgagagctcagagtcgctcgtcaggactgggccgaaaaggggcgacgacgggccagacgaggtcgactggtgccggctgtgcttgccgccgccagcgtcggaagggacgggtgtcgacgccctcgagcctcgcagcgagcccgtcagatttcggaagacgctcaggcggccggacgtgtcagaccgggccgagagcgccggcgaaggcggcgagaggtccggaagctcgatgtcggcgaaggcgtcggttgaccgccaaaagttgaagtcggtgtactcggggatcgcctggacgtggacgggcgggaacatctggtcgacgaggtcgttcatgaagatgtacctgggggccggtggaacgggtgtgaggtcagcaaagcgacgcccatggtgcacacgcggcctacaaaggagacgcacgacgaccggtggccggcaagctcgagcagctccatccggacctcgccgttcgagtcgatcgtgaagatgcgcgaggacggaatgttgaccgaccggtacgacatggcgtcggtgatgcggttgccgaagccagcgtaaaaggccgtcttgcccgggccgaaaaggcgctgaatgtcgcgcaggcaggccatcttgaagacttcgggcttgcggaggatgacctcgctggcggtggacaagcattagagcgtcacgcgctggcccaccagagtagaaggcgcatagggcgggaggaggaacgcaccggtggagcgacgtcatgagccggtcggggctcatgatgaccggcccctctggcagctgatacttcccctgctggatgttgcgcaggtagtcgcgcgtcgagtcggcctggccgattgcgcgcgaggtcaggtacatgatcttgtagccgttgttgacaatgtcggtgtagagctttgcgacgccgaggtgagtccagtcgcggccgaccgcgttgaacaggtggccgagcgcgtcagacctggcgcgcgcgagacgaagaggacagcgtcagctgaggaagggaagggcggcatctcggaggcggcgaactttgtgatggtgccgtcaatgtccgagatgacgatgtggtcctcggcgctccagaggaagatgcgggccgagcatgtcgccatgccagagtaggacgacgagaccgaaaatgtcacggtgtttgcgccctttttcaggccgagcgccttgagctggctcgaagagagccggaggctctttgcgaagtgcgtcgaggaggacgggtcggccgctgtggagggggtaccgcttgcgccgtcggtcggatgcgtcgggtgcgcggcgggctcgggcggctcagagtacgaccggaggacctcggcctcgacctgggcgtcgagcgcagagtcaaccggcaggtcgccgtcgtctgccgctgtcggaaacggcacgcgcatcccctgcggcatgttcgccttctccggatcgaccgcgaacgggacctccttggtcgggagcgtcgtctcggccaactgacggcgcgcatcgtcgtcgtcgtccgtcattggtggaggcgaaggtggcggggatgggtaggcttcgcggatcgtcgaggctgacggggcgtgggtcattggcgcggacgacggcccgccggccgaggttgcgtcgaggtcgagaaagtcgggctcgtcctgctcggcgcgacaagcgagtcagggctcggcaagctaagagagagcaagaagcgaacggtacggaccgtcggcgaaggcgatgcggcccgctgcgactgcgggcctgaaccactccgctctggcacgacgccaaacttctcgtctcggagccggcgctcggcgtcacccggccgctcgttgaccggcggcgaaggcaacgggttcgaccggttgccgtcggggctcgtcggcgtcgtgtttgagggtgcaggctgcttgccgggctgccagaggcaagaaggaaagggaggttaggctagttggggggttggggggttgggcgcgcggccggcggttctcgcacgtgatgacccctcctgcatccttaccgagcccagccgacagggacgtacctcagtcgcgccgatgagcggactcgtcagcagctcatccgggacgttttcgtccgtctcgacgacaaagaaggcttcgccggcctcgccgaccttcatgctgaacgggacgacgctgtcgttgaccttgagcgtgacgcgcttctcgccggcccggaggacctgaagcttgccgaagcggacgtggaagggcgagcacatcagggttgactcgtcgccgggagtctgtcggtttagcaaggcagaaggctctcggtcagcctcgcggacggacagtcgacggccaggcctagcgatgccgcaacagaggggggagccgggcgggtgggctggggactggggtgagcagcgcaagcgaacgaagggcagggactgacgtcggcctcgcgctcgacgacgatgacgtcgattgcgcccgtcaatgtggccgggttgatgcccgagtagtactggtaggcccgcgaaaggtactgccgttgggtgcgtgtgggtcagaccaggtgtcagcgggctgagctcggggaggcgcggcgagcgagccgagggagtgccggaagctcggagacggtgacggacctgcatggcggcggcaagacggcgggggcgagatcgggcgggctccctatgagctggaaggtctagctgtggtcgtggcgaggtggtggtgcaagctatgggtcgtcgttgggcgttcaacgccgccggagcggaagccggcggccaagacgacaagaaggccatgacgacgaggttccgacccgaccaccatacagagtcacgatggccgcagtcctgattagtacgtctgctgcctacttactcgctctctgcgacgaccgagagcagctttagccgtcctgacgacgacaccatctctcttcgccgctcgccccgcccgcagtctccgacacggccgccgccgacccgaccaagccctcactcgacacaaccggcccgactatcgcctccgccctcgcctcctcgccggagcttgccggtctcttcggcgagaaggacatcagacgcgccgtcgtcccggatgaggtcgatacgatccgcggcgtcgtcgagcgttgggcgagaggagatggaaagaaggacgacggccagccagtcaggctgattgtcacgacgggcgggactggcatgggtaagagggacgtcacagtcgaggcgagtcggctctgtctgcgatcctagagtgtgctgctctctggcgagtgaggatgcgatcctcgcttgccgctcgccagacggccttgttgcgggtcaccctctcctcgccccttatcggcgtgcgctaacctcgccctccgccttacacaggccatctcgccgctcttcgccaagccgcttccggcgctcgcccaggcgctgacagcctacggcctcacccagacgccccttgcggctctctcgaaccctctcgcgggcatcatcgactcggccggggggaggcgagtgctcgtcgtctgcctccccggaagcagaggcggcgtcaaggacgggctcaaggtgctcgtgccgcttctgaggcatgtgctggccgtcgtcgacccgagcgagaagggcctcgcggagcaggcggccgtccatggcccgcgtactgtcggcctgacggagggaacggcgactacgtcggcgcttcctgtgcaggatcactgctgcgcgcaccaccacccggtcgcccgccactcttcgacccacgcccatcccgcgccaggaacgacgcccgtcagctcgcgccagcgccagtcgccccacccaatggttgccctagctgatgcgctcgccctcgtccattccgtcgtcgacggcctgaccggcgcgctcgggaccgaacggcgcccgctcgatggctcgctcgcagggcacgtcctcgccgagcccgtccgtgcagcacacgacctcccggcctggcggtcgacgaacgtcgatggctatgcggttcgctcggtcgacaggccctcgggtgagcggcgcgtccggccgaaaggcgcgagcggcgcttgggcggccggcgaggtcgagcgcgtcaacacgggcgggcctgtcccggccggcgcagacgcagtcgtcatggtcgaagacaccgagctcgtcgcgtcctcgccggatgggaccgaggagcggacgatccggctgctcgcgcatgctgtccgcgagggcgatcacctgcgccagcccggatcggacctcaggcaaggcgacgaggtgatggcgctcggcgagcgggttgggccgggcggaggcgagattggcgtccttgcctcggtcggcaggcgggacgtcctcgtccggagacggccgaagatcgccctcctctctaccggcaacgagctcgtcgacctctcgtcgccggccgtccaggctcggcctgatggccaggcggccccgctcggggaggacggcagctggacgggcatctacgactcgaacaggccagcgctccgggccgtcgcggagggcatgggttgggaggttatcgacctcggcgtcgtcagggacgagttgcgttcccgcttccttttcgccttcggcctttcgaacaagttggctgactttgggtgacgctggcaatggcaggcccggggcgcatgaagcagctatgcggaaagggatggaagtcgccgacgttgtcattacgacaggcggaacttcgatgggcgagggcgatctcgtcaaggtcagtcggtcctccttcctgctcaccggcgcctagaagggctgaccctctctgtcgctttgaacgacccgcagcccctcctcgagcacgccttcggcgcaacgatccactttggccgcgtctcgatggcgccaggcaagccaacgaccttcgccaccgtttcgtcctcttctggcccggccaagctcttctttgcgcttccgggcaacccggcgagcgcgctcgtcacgttctatgcgtttgttgtgcctgcgctaagggggctcgggggctggaagcgcgaggagcgcgagcttcgaaaggtctcggtcaaggtacgtagtctgttctcgaaacctcgcaggagaagacgaaggctgaaagtagagccgccctcgttcctgcagctcggccacgccttcccccgcgccgaccgaccgacctaccaccgctgcacgctcgccttctccgccaccggcctccccgaggcgcactcgaccggcgggcaacgctcgagccgagtcgcgagcgtcaagggggccgaggtgctcgtgctggtcgaggcggctgatgagcgcgggacgattggtgcgggcgaggtgcgagaggggctgttgttgcccggcggatggggagcgtgacgccaggacgaagagaaacgatgcggtgcacgagcccgacacgagcacgctcgtatcgcatcaggagagcagctttcatcgatcgcgtcgcccccgcttgacgttcccccacccaccgtcgcctccgagcacgggcgccggctggacctcggtcgccggccgccgccgcttgccaccgccgatctcctcgtcctcgaccatcgcgtcgtcgtcgtcgttcgaggttgagttggcgtccatgtcaacatcggcaatggcggctgctgctgttgttgatgcggtcgttaagttgagcgaccaggagcagaggacgccatcttctgagccagtgaagagctggccggactgtcggcgttcattgagaggtcaagttagtggagaccttgcgaccttgcgaggtaatgcgagcagtgagacgcagaacgtacggcaggttgaaagaaggctgagcggacaacgtcgcggtggccgcggtgcgtgctgttcagccgcgtctgaaggctgacggcgtccccgcccgtgcggttgaggagcgccatgtgcccgctacgaaaggaaagtggtcagaacgacgggcgctggaagctggaagactgagagcctggcagaggacgcacgcgttgctgccgacgagcgagaggggcaggtcggtcgacgcggacgcgagcgcgagcgccggcaggagcgtaatgaggtagtcggtctcccaggcttgagcctcggccgtgccctcctccgtcgcaagccggagtgacggctcctggaccttgagcgagaactggcgaccggtgataaggggtcagtagggcccaccactcgggcaagagggaaggaggacgcacgtcgctcgcgtcccagaccgagacgccgtccatgtcgtctcggccccagacgccccagccactgccggtccagccagcatcggcaacactgacgttgacgtttgcgaccccgagctgggcctcgtcctcgtcggcctcgcgggcgtcggtgagcgagagcgtgccgtcggtcgaacccgaaaggaggatcgccgacgttttcggcgggggccgcggctcatctgagggagaggccggttcgagcggaaaggagaggccgtgcaacgacggaggggcgaaagcaagcgtcgtgatgtcgtcagagtggatcgtcgtgtgttggtagagcggcgtcttgggtgcgcgcgggtccctggccgagagcgacaggttggcgtcagtctcaggcatcagcgcgcaataagggctgaaatcccagacgcaccagtagacgatagacgcctcgtggtttgtcaactcggttcccgcagcgagcaggtggtgctcgggtgcgttcgcgagcgagagcagaggcgtcgtcttgcctccgggcactgcggcggccgaccacacgcaggcgtcagctcttagctcaacagcagagcgtcctatagcgagcgcacctcgcatgctggccgactttgaaccctcgacccggccgcccttgacgcgagagtcccaggttcggacaacgccgtccttgcctgcggtccaaacctcgccggctgagccggcagcggcgttgacgacgaccgacgtgacttcggcttctggctcggcacacgaccagttgtcgacgatctggaaggtcgcctggtcgacgaccgtcagatgggccgagccgtgggcgagcagcagccgcctgtcgtcgagcggcgtgatcgagaagacatacggcttgacgccggtgccgggcgccggtggaagcgcgaccgacgatgccggaaagactggcggagcggaagagggaaacagcaacatagcgcgggctgacaggcgctggataagagcggtcagggagttgtggttgggctgcagacccggctcgctaccttgctcgccttggctcgcctctcgtccctccgagggcgcgcagtctgcggctgcctccgacgattttcgacgaggccagacagcttgaacgacccttccttcatcaccaccaccgaccctctttccttggcagctctgtccgagacccctatacaggcacgctcagcccgcggacccgactcttgatctccgctaccatgcccgtcaacccggcttcgatcggcaacgcctacaagcgcagcgacgagtaccgcaagcagaagcgccaaaagggccaggagaagctcaagcgccgcctcgaggtcaagaaggacgaggctgagggcgaggatggcgaggagcgcaagaaggtttgtcgcggtgtgctcatcgtgtggattgcttggccgaagctgacctcccttcttcctgtgcctctccctctgctccccaccgccgccgccgtcagcgtcgactggaggccaacgtcccgcggacgcaggacaactcgcgccagtacggctcgtcgcacctgacctcgcttccgacagcgtcgacctcggccgctggccagggctcggacgacgatgaggaggctgacgaggagaagcggaccgcgcctgaggagggcggcatcgacgccatcccagcctcccgctcggagccgggtgggccggccaaggaccccaagattctcatcacaacgagcgctaaggtctgcaaggagacgtatgcgtttgccgaggagctccgcggcatcttccctggcggccagttcttcaagcggcccggtggcaagtgcgttgtctcgcccgctcgcgcgatcctgccctgctcatctgaggcacaagcgctgacgtgccatcctgctcctcttccttcagcggcttcgagatgggccgcatcgcgcggtgggcgagtgcccgtgactttgatgcgctcattgtcatcaacgaggaccgcaaggtggccagtgcgtcctcgcctgtgtcgctcctcaggccgctgcgcgtagacttggcgaggctgacccttgccggctaactccctccagacgccatcacgattgtcaacttgccctatggcccgacggcctacttcaagctgacatcggtccagctctcgcgccagatctcgggccacgcccggcagacggcccactcgcccgagctcatcctcaacaacttccagacgcggctcggtctctcgatcggaaaactgttcggctcgctcttcccgccgctgccgcaattcgagggccggcaggtcgtcacgcttcacaaccagcgcgacttcctcttcttccgccgtcaccggtgcgtgtaagccgtctaggcccgaggaacagcgactgatgctgcgacctctattttccgctccagatacatgttcaaatcgatcgaaaagacggcgcttcaagagatcggcccgcgtttcacgctcaagctcaagtggctgcgcaagggcctgccggccgtcaccggcggagcgagcacggccgtgcccgtctcagtcggcgccgacgagtcggaggacgaggatgaggaagttgattccgcggaagaggccgagccggtgaaggccaatgacgaggaggaagatgaggacgcagcggaggatgatgccgagcaggcctcagcctctgatgaggacgccgaggaggacaaaatgccggcggccaagggcaagaagagcaagcggacgataccgcctctcaacactcagggcgagttcgagtggcagtggaaggtgcgtcttcttcgctctctcgcgaccagacggcagatcgctaaccgctgcgctcggccctactgaagccgaaactcgagatgtcgcgcaagacgttcttcctctagcttcctcacgacctgctgccctctcttgccctctcctcatgaccctacgacgcacacagagctttccaggaaaggacaattctagacatcattggcggtcgtcccattggacgagccgccattcaccgtcgccccgttggggtgcttgccgttcgtcttgggtacggccgccggctcctcgccaacgagctggcggaggaaggcatcccactggcggtcccagagcgcctcgcacttggtttttgcctcgtcgtccatgagcgagtggcggatgctgccccgcgtgaggacgccgagtgacatgaggcctaccgcctcgctgccgttgatcagctgaaagagatcgaagcccaggccgaaattcccaaacactgcgtgcaagggagacgtcagcgaatgatcagacaaggcgagctgatccagacgcaccttggggatcgtcattcgagatgacgacagggacattgttggccaggagcgtcagcagcgggtggttgaggatgcttggcgtgtacctgagggcttcgttgctacacgggcagacctgtgaccggtagcgcacgggagacgtcagcgaagggtcaaacgggacaagctgatcccgatgcacctcgagagcgatgccccgctcgcggcagagctccatcagacgcgggtgcttcgcgagagagaagccatggccgattcgcttcgtgccaagcaagatcgcatcgaaaaggttgtcgtcggtagcgtccccgtcgccgagcgtctcgccggcatggaagcagaagggcacgtcgagaccgacctccctctgccggtcctggaaccagagcagggtcggcaggtagtacttcagggggttgagcgagtcctcatggccgacgagatcgaagcctgagcgaggcaacgccgaggcatcagaaacgctagctgaaggagagacaaatcgattgacacacctttgatcaggtcggggaactgcgccttgagccgcaagcaatcctccagcgcctcccggagcgcgtcgttgtcgatgaagcggacggtcgagtagatgatggtggcgccccagaaggcgtcggggcggccttgacccgagagctcagcctttacctcctcgacgacctcgccgtagatgcgcacccagtcggcgtggtcgaggacgccgtcacaagcggcgttggccattgatctgagcgacggaagagagtcaggtctatccagcgctggcgactccgccaggagggcggcggacggactcggtcaggaagttgacacgcagctcgaggtagccgatgccgtcgtcaacagccttgaggaagagctctcgaaggtagaatcgaaacgtgggctcgaaaaagagaagactttcggccatcatgaacgtcgtgtcgaatttccgccagatgaggtccgacgtaatgaactggttataggctgctccgggctcgaccgtgatcagccgcttgatctcggcgtcccaggcctttggcccgccggcgtaggcctcgcggacgcggctgacgggcacgtactcgccggcggtatacgaggcgtcaaagatggattcttctgctgcgacgtaagacgagggcagcggcttgaagatcacttggctctcgacgggccaggtcgggagcgcagccgtcgggtcgagcggcccacgaggcgaggcgacgtgcatctcgggctgggcaaaggcgaggtcgatcaagaagcgtgcgtcgttcctggcagaaggcagcatggtcagctctcggcgctttcctgagcagctcaactgagggtaaggatgaacatggcgtccatgtggccgtgcaggagggcgccctttggcatgcgccggagcacgtcgaacagctcggtccgctcaatcgcatccttcgccgtgagaaagtgcatgccggggaagagctctggctcggccttccagacggcttcgcgctcgcgtgcccggatttcgagcacctttgcctcggcctgaggaaagcagccgacgggtcagctcgagtttcagcccacacgtcggaggaaggcgctgcggcggaccaacccggcgctcgagattggtcaaccgggcgagcttgccggcatcgaagcgaagtgcacgctcagagctgacgagcttctggcgctcgtcgttatacagttccatttcgtcgagcttcgtatcagggtggtagtaagagtagtgagggaaggcgagcatcgtgcatggcgtcgacgcgcgccgagccccgacgaaacggaggagctcggcctggcccggcccgataagcgcgggggtgtacgaggtgccggcacgcctgatctcgggctgccttgaggtctcgcgaaggatagcgcatgatatcaagagaccttcaaacggtctgttcccattcaggccgccagggagttcccacgccgtcgacaaagcagaagccagccgccctcagctgctgcgcaatctccaccaggccgacaacctgaggcgccgcctcggccgcgaaggacatggcctcgtacggcggatcgagtccaattgttcgcagggcagggaagcgcttggggaactccttggcgatccgacagacggaggcgacgttacgccttagcgagtggctcgccgtgaagccgtcttcctcgggaccttggtagtcgtccgccgggtaggtgatgacgagcgtttcgagcgaggggaacggctccgagagggctggcccgatgtcgtcatgagcgagtctgagatggcggagggagcggaaagcagcgaggaaaccagccggaagtggcgaggtcgaccgccaaatgatgaggctgaggctgaagagccggtcgaaccgacggatggcagacagaacgcgcggcaagtcctcgcactcgatgttgaggatggacagtgtcgtcagaaggtcggagacgtcacggagaagacgctcgaattgcaatagcgtgtcggggatgttgatctcaagcgtcgtgagggtcgacaggtcaaagtacgcagagggcgtctcgcagggaacgcccctgtcgtggatgctgagcttgagcgaccgcagcgcgggtcggtgggccgcttcgggtgcagcgatcaggtctcggccggaccaggagacccactccagccgttccagggcgggcagatgaagcccgacaatccctagtaggttggacgagacattggaggccggtatcacgacgatagacttgacaaattggccgatgtgccggcggccctccaggaagatagacaggcgggccagctgccataggcaactgtcgggagtgcgaggggagcctcttagatcgagctcctcaaagaggcacgactggcttgcgtcctagggtggagactaagctcaatcagcatgagacccaagcgagacgggagcctaggtgatcagggccgaaccctccaggccgacgagacgaggctgcacgacgcgagatcctccttggcggcgtgctcgatgacggccagctggagctcgacgggcagtctgggtcccctgcacccagcgcaggcggaaagtcggtcagcctgctgggcactctgagagtttcgcgactgaacgtacatggcggcaggtccggcaggtagcgagaagacttgctcgtcgacgagagcgtcgaggctaagaagcgggcgacagacaggggcggccggctgtggtacgatggcgcgacgtcagcttcgagcgcggctcgctcacgcttctagaacgagtcaaacgcaccagtctccgtgaactgacctcgaacggtaggttgagacgctcgtcgagtcgtgtctgtgagcagagtcgtcgttggcagctaagtcggcgaggcgaggcgaggcgagctctgtccctcgacgcgcgcgcagcagccgttgccttcgccctcctgtcggctcgacgaccgctccctccgacgtcgatcgacacctcgcggcacgagatgagcttctggggcaaccacacctgcccacatgagacggccgaggaggacccgatccctttctacgccaacggcagcttcacattcaaaggtacgctgtctcgggctctgctcgcgacatgagcgcctgggctgacccgcctcctcctccctttggtccagctcaccacctcggctggactgtcgccggctttttcgcgctcatcagcacggctgtctcgctctggctcatcttcaagcacctcacctactttacgaaccggacgcagcagcggcagatcatccggatcctgctcatggtgccaatatacgcggtcgcctcctttctctcctacctctttcgtcaccaggccgtctactttcacgtcgttcgaggtccgtcgcatatcctaccgtggctgcgccgagcttaggctgacctagctccctgcctcttcagactgctacgaggcaagcgagcctcgctcttcgccggcggtcgccgacgctgatcccgctcctttcttctcttctgcaggctttcgtcatcgcctccttcttctacctcatcctcgcctaccttggggaggatgatcaggcgcagtgcgccgtcttacgccgagttgagctcaagaagtggatgtggtgcgcacgagcgccgactcgatccaccctgtcgaatcccgctgacctacaactgcaggcctcttggttcagtcaaagctcgcccggccagcggcctgtactttctgcagctcatgaaggtgagctctgtttgtctgggctgaggagaccacgcaactgacattcgtaaccctaaccgccagtggggcgtatgccaatacgtggtgctgcgccccctgacgacgctggcagcctgcattctgcaatactttggcctctactgtgacgtcagctatgcgccctactacggctacctctacgacctcgtcatcgtcagcatcagtgtgacgatcgcgctctactgcctgatgcagcttgctgtcgttgttcttgacgagctcaagccgcaccggccgatcatgaagtgcgtcgccttgggctggctgtctgtctctaggtgccgcaccgactgatcgtgaaagtcttcttcctataggttcctttgcgtcaaggtggggcagacgcgctcgcccttgagtctgtggtcattctgaaggctgacccacctcacttcgacagtccgtcgtcttcctcatgttctggcagagcagctgcctcggcctactcttctgcttcggctgggtcaagccgactcgctactggtcggccgtggacctgcagaccgggattctggcgtacgtcctctcccagcttcatcgtccgaccttagagcgccggctgacacctttgaggactcctccaggctcctcgagacattcgagatgtgcatattcgccttcctgcacgtcaaggccttcacctgttagttttctatacggcgagccattgtcggaagagaggtcagctactgacatccttaccgccttgactcccgcagaccgcgtctatcggccagacgaccgttcgctcaagacgtcgcaatggaaggctttcgttcacgtcctcaatcaccaggacttgctgcacgagattgcggccggctcaagctacctctgggccaagatgcgcggccgcgagccagacgcgacaagggacgacgacctggagcacctcacgggcgcccgtcgtgacgaaggcccgcctggtaaagcggaacgcctcaaaggggatggcgccgagaaaaaggccttccgcgacgacccgagcgacatcgacttgctcccggcgctgcaccagcggcagcgactgatgcagagccgtccgcaggcctcagctcgagcctctcagatctcggaggaagacgagtactctcctgcccctttgggtcgcgtcgatcggctccgggcgcgctacgaaagcctgtcggtcgacgagcctgaggcaagtcgcgacccccgcttgtcgccggaaggctggagcgtgctcccgtcaaatcccgcctctcagcagtttccgccgaatcttaccgacctgcctcggctgcgcatgccgcgtgggccaaacgcaatcgtcatccagcccatcgacgacagctaccgttcgatccgcaactcccggggcaactcggagcgcggcacgttcggtctccggcactcgtcaagcaccggctcggtcgacggtcacctgcgagaggcgtcagccgactcgttccagacggcccagagtcgcctcgcgcatgattctccggcccttcgttccgtccagcaacatgcggcgcggctttctctcgatggctcgctgccctcgggagtcgtgccgttcatcggtctcccacgcggtgcccacctgccctccgccggcggtgtcgtccggcccgtcgctcagcatgcccggcctgtcgctcagcatgctgggtcagtcgcttccatgctgcctgacgcctcctttgggacggagcgctgacgcctgaccccttccgcagcagcgcctctcgcttgtccctgagtgcaacttcggacctgctagagcgagactcgcgcttcccgcgctttgtcgccccgcccaatccttattcccttcccaacacgcaccgatactcttacaaccacctctaatgccctaggccatgctctccttctcggacttgctttgtcatcacgccacggatcgccactgccccctctcaacgaccacctaccttatgagcgacggatcccctgcccttctataatgccctgtagacaacagcgccgaggcacaagctgagagcaaagggggtatcattggatgtgtgagggtataccgccggccggccatctgcgcctgctgctgcccgccagacgccgagaagatcacttcaggatcgacgccctcgcctttccctttgaccggccgccgccaccagtcgagacgcgctcgccctcgccgtcccgctcgccgtcgtaatagtcgttgcgggcgcggtggccgtcctcgatccgggcatcgccggccttaccggtacctgacgtctcttcgtccttctcctcggcgttgcgctcctcgctctcgagccagcccgtcaggtccggcggaatctcctgcatctgtaccgagggcgcgccgttgaggtagcggagcgtctcgcggatcgagacgcgaatcttctcaagcgacgcccgcgtattgaggttctcgacccggccggtgagcggcgggtgaagcttgaagtcagggtagaagaattggtcgtacggcgtcgaggggagggcatccggtacgtcggtctcgcagaggattgacgtctcgtaagcccagcagcgcgagacattgctggcgaggcaagaggggaacaaggtcggtcagcgacagccctagctgcatgtaacgacaggcagagcaactcaccggatcgtgtagccgcctccgccgagtaccatgagcggcaggccgaacgacttgatgaagcggacgcactcgccgtgcgcggcgatcgacaggttgaaggcgccgagccggtcggcgccgagcgagtcggcaccgcactggaggacgatcgacgacggccggaaggtcgtgatcgtcggctccatgactgacttaaagagtgagatgtagctctcgtcgtcgatgccgtcctggagcgggacgttgaggctgaaatactttccgaggccgttgccaatctcgtcgacggcgccggtgcccgggaagaagtcgccgtgaaacttgtgaaacgagacggtcaggacccggttcgacagataaaaggcttcttgtacgccgtcgccgtggtgaatgtcgatgtcgatatagaggacacgaggatggaagctgcgaagcgcaggggggcccggtcagcgaccagacggaagcaatgcagagcacccttcgagagtggctcaccgaagaagctcgaggatgccgaggacgatgtcgttgacgtagcagaagccgcttgcctcgcccttcttagcgtgatggaggccgcccgaccagttgatagcaatgtcggtgctgccgtgcgacagcttgcgcgcggccgcgagcgacgccccggcatactgttggcagaagtcgtagaggccggtaaagacggggcagtcgtcgccaaagttgaactgctggaactgggcctgcagcgacggtggcgctgaaggggtgaccctggaggcacaggcaggagcggatcagcttcctgagcgtacgaaacaggcagcggaaggcaggctcacctcgataggaagtcgacgtagtctgaatcgtgaaacatctcgagctcgtcctgcgtcgcctcgcgcggggagaagacgtccatccgcttgtgtaggccgtagccgacgacgagcgagttggtcagggtgagccggtgcggcttcattggatgccgctcctggaggacggcgacgaagcccgggagcagggctagggtgtcagcagggtccccatccggccagagaagcgacgcagactccaacgcacgccatagtggtattcgccgaccgacttcggaaagtagtacgagacgcgcgactgcgagtgaggctgggcgaggagagagaggtatggcaggagcgacgaccaacggtgtcagcggagcagctcaacgcttcacctccctgcctctcgtactccccaccagactcacctgaacgacatcgttctgctgctgaggtttgccgagatccttcctcgaccagaagaagggcgtgtcggaaaaggtctggacaatgtccggcccgaccatgcgccggggaggggaggaccagaccctacccgggggtcgggcgagcgaagggagggtagtctgggagaaagggcgccgccgggagggctagcctatcgtttgctagtatggctgcgacccacgcaagccggtctcgagagacgctctggctgtagcagctggcggtggttggcgaggtcggggctgcaagcggatggacgtcgggcggcaacggcttgcagactactttcggcctgacgacggcgagacagaagcggcactcgtcctcgaccttgcgctctcgcatccccaattgtgtgtatgcagagggcctgacctaatgtagcctcatcgcacgccactagagccacctctgacccaacttagcattacgtgccagtcgcggtgccgccctagtcctgcggtccgtcatcatatgtcgctgccggccacgctgcgaggccaagcctctcctgatgcctgtgtccacagcagggcctcctcccatcccttcccccaccagcgtcgtctatgagccccagaatctggatggcgagagcgacgagcgagcgaggcacgcgacagtgacagtcagccgaccgagtaagagcagaccgaaccagacgtgacaaaactaaccccttgcgcttggtgaagcacatccaccacttgctcgggacggtcgcctgccggccccttgcagagacgcaaagcgatggatgaggtcagccgagcgcagatgtcgcagaccaaagcggcaagcggcacgcactctgggtctaccgggtagaggtgctcaagcagtcgggacgcaacttcttgccgggcctgcgtcaggtactgccggaggtagtctgcgtagcaagtgaatgcgatcagacatcagctctcgctccgctcgccgtgagagctgcgcaaaaggtcggaagccgagcgggcggctgaccagagtccatcgagttggccggggcggcgtacatcgagttgagcgggaacgttgcgtcgcccgggagcgcaaagctttcgagcgagagcgtcgtcaacgtcttctttgcctcggccgggccgggcgggatccggctcgcgccgagcttggcgaggcactcgctcacaaagagcgtcaggtagatgagcagccggtcggccgggccgttgatctcaaagttgcggaagaggcagttggcccggaagagcgagagcgtctcgtcaatgatgtcgggcgaggacgggtcggctggagggccggccaggagagaggcgagggagacagagagcgtgtcgagctcatcgtcagcccggttcagcagcatcctggccgaagccgcagctgacgaacgtaccgagcggtcccgggccacggaagcgcgacttgatcgggagaaccgacgtgttgccaacctggcggacgtcctcgagctcgttgaaggtcgagtggtaagcctgacggtgacgacgtcgcgccgtgagggggcagccagcaggcacgagacgagtgggtcagtacagctggcagctcatcatctctcgctcccgcacgacacgtcaaacacgtacgggcatgacgggcgagggtgggctggttggcaggtaagggtcaaaggacgacgagagagagagatggagtcgcgatgaggcccacgcccgcgcgcccgccgacctagggttacgaagccgctcaccaaagctattctcctctcgacagcaatgtttctcagactgacagccgatgcaaggtgaaagttggtacattgagagtagcatgggcataagaaggggtaaaggcagggcgcgccaggacgtgcggcccagacaggacggcgctcgccgcctctgtcagcggagacgggccgcggatgctcgacatcgagcatgcattttgaccgacgatccaaggaggtgacgtcgtctatgccggagggttcggtccaggagctgcgagcaggggcgtcggacaagcgagtcaaccgcctgtcgacttgatcagcaggggaagcatggaactcactgtcgtcgtcctcgtccatcactgcatcatcgccctcgcccttctgccgcttgcccccgcgctcggcaatcgtatcctcctcctcgcgtgcccgcttgaggtcgtcggcctccttctgggcgttcgagaccgtgaccttcatcgggcccgcgggcacgtacgactgggcgtcgcccgagagcgctttcgacggcgtctttgcgtaggcgattttctagcgggcacgacagagggacggcgggcatggtgagctgatgcgctgaccgtgaaggaagggatgaagggggggagacggaccagaggcttgccgtagaagacctcgccgtcgagtgcgcgctgggctgccgtcgctgccgtttgactcttgaacgcgatgaacgcctgaccgcgcgtcttggcagtctgtccgcgcagggtacgaagcagaaggcaggcaatcagcagtcgctcgagcgctagggcccggatccgggctggcacggaccttgcaggcaacgatgtcgactatccggccgtatggcgtgaacagctgatagagcgagtgcctcagctctggcgaagggcacaccacagtcggtcggacaagcacgtcagccaaggcgcgctaagctgtctggtccagcagcatcagatgcacccggcttcttggtcttgtcactgagagagaggcaaatgcagcgcgcgacaacggtcagctctggaggtcgagcggggcgagctcgaaggacgagccgccgagctttcggagcagcagccgacgcacttgaggttattgacgtagagcgtcttgctgggttggctcattccggcggggggagagtgtcgccacgggctgcgacagggagaggaagaagtaagagagaggcggatgggagcgagagcaagggggtcgtcgtcgtcgggcacagcggtcgtcggcgagggaggccgtggtcgactatattcatctgatcatgattaggtaagccggcctcaagtcgacctcgtcggtcggtcgagctcgcacgtcggcagccgacgacgactctcgcccacaccagccgctttctccttcccaatggccgcctcctcgggctccgtcctcgccggcaggaagcgcaagtcggcctctcgcgacccggaacaccagcagcagatgtcggccggggaagccggcagtagcagcggccactccgcgccgttcgtcgtcgacctcattggcaacagcccagccaagcccggcagcgcgagcggagcggccgaggtcgagtcggacgacgacatcctgatcatagagcccgaagtccgtcgtcgctccggtgatctaggaccgcctccgagctgctgaccgaccccttctgctctcccggcaccgccgcagacgtctccgactcagcgaccaccgcctgccgcccgcttgcgctcgtcctcgctcgagatcgagattgtcgacgacaggccacagcacaagaagccgcgcctgtcgtcgcctgcaagctcgtcgcccgagccatcaagagccgcagcgtcagccgctccgtcggccgacgttgacgggctgttcttcttcgatgacgcgcccaaggcggtcaagaagaaggcggcctggctcagcgaggacgacagcacgccgccgacgccggcaggggagagtgcaacggacggaacggcggccgacacgctcgtcctcccgagccatatcatcgtcgagggcgagccgctcgcggctggcgaggacgcgaacctggtcgaggagggaggcgagcggcctctaacggaggcagaggtctttgctgacgacctcggcaagatcgagttcctcgacggcggagacgacaagccggttcgtcttgggactcgtttgcttgcatgatggcttgcctgctgacgcccgagcttacggcaacaggtccagcgctacttcgacctgacggaggacggcgagccagcaccggtcggcaagcagcacatcgtctgctcagtctgcaaggagcgcgggcatgtcgcacgtgactgcaaggtcatcatcgtgcgttcctacgcgcttgctctggagacgggctgaggcggctcgctgaccgccttcacgccttctcagtgcctgacttgtggcgcccgtgacgagcacgagacgcgcaactgccccgtcgcgctgatctgctttgcctgcggaggccgtgggcatcggtcgaaggactgcccggcgccccgccacttacggcagtatcggcacagcgggccgatgtgcgatcgctgcggctcggacgtccacccgggcaacgtgagtcttccgtcttcggtcgctgcgccgcgagatttatgactgagcgactgacttgcgcgcaacgtttccagaactgcccgacgctctggcggatctactcttacctgacgccggacgaccggaccaagacgctcacgacccggacgcacttgcacgaggaggacggcttcgagggcgatgtgctcgttcacaatccggatgacgaggacgatggctggtgctacaactgcgccggcgatgaccactacggcgacgactgccccgagccgcgcatctcgcgcgcgccccggccagacttctcggccttctcggcctacaactcgcagaactcgcccttctggacggggccgtcgacatcaaagcggccgcctcggccgaagcggaatcggccggcaccgagcgacctgaccgtcccggacgagatggctaacgtcggctggcgcggcaagcagcgcgagaagcagaaggcactcgagtacgaaaagtcgcggaaagcggccgaggaagacgatgctggctcgagctggttcgaccggccggcctcctttcctggccgcggcgagctctcgatcaagggccggggcagctcgagcagtacggtgcgcaaggccgacgagaccgcgaagaaggccaagaagaagaaccgcaaggagcgccgggcttctggcgaccgacccagtcgggacgacgacgccgaatttatctcgggcggctcaggcacccagctcgaggccgagtacagcatggactatggcagcggtggcggcagctccaaggcgggcaatcggtctcgcagcaactcgacccggtccgacgtctcgagtgctcggggtggcagcaatggcgggccacgcggcaaagagccgccgaaacagttctcgttcaagtttggcggcgggcctcccggcggcggagcttcgacgccggtctctggcatcaagccgagcacctttgcgcgcatgggcggcgagacgcggtacgccggaggaccctcgggcggttcgccgcagcagtcgagctcgtcgtcgtcgacgcttctctcgcggctcgactctgaggtcacgaacggcaagggcaagggcaaggcctcgggcggtgcttccggcaagacagcgctcgcgccactctcgcgagccgacctacgcgacgcccagcgcaaggagaaggagcggcatgaggaggtcaactcgctccttgcccggctcggcggcaagaagggcggccggccagactggctcgattcgcccgaccgacgaggcggcggcgccggcggtcaaggggggacgagcagcggcggctcgggtgctggcacgccgaccggcagcaggagtcgctaccaaggcggctaccgctgaggcttccttctacatgagcctcgcagcagcgagcagcgtccttcgcatctagatccagagcggtacaacattgggaggaaaggaggtggaaggaaaaggtccgtgaggtctgggagggaggggttccgtcaaaggtcggccttgaggaggcagctgaagcacgtctcgcagaggcccatgccctcgtgctcaaagattcgcaggccctcgaagggtccttcgcaagtctgagtgaggcgggacgtctcgtgtcagcgctgcgggcaggcaggaaggcgtcaggggacgcacctcgcacttgaggcactcagcgtgccatttgccgccgagcgcctcgagcatctcgcccgcgatcggcttgtggcaacccttgcacttcggtgcgtgcaagcggacgtggcagccatcgcagtacgggtggccgcgccacaggttgatgtttgccgtcatggcctcgacgtcgtcgtcggcgtcggtcgccgaggcttgccggccgtgccggagcttctcggttccggccgaggacgaccgatgcgggtccagaaaagggtcgccgcactcggagcagaagaagtggagctcgtggtagtagcgaggcgtgccgagcgaggggtcgttgatcgtaaagaagcgctcgtcgacgatcggagtcttgcacgtgtagcagcgggtcgtgaacaactgagacgagggcgtggtcagcggccttaacggcatgccgaagtgagcactcgagggacaaacctcgtgataatccaggtggcagtaaagcttgccctcgtgctcgaaggacgagacgtgctcgagcaggaggctgcacgtcgtgcatctgtcaagtcgccagtcagatcgggcggtcagccattggcgtcgcacggaatattgggccaccgctaaaactcacttaaagcactttgggtgccagaacttgccgccggcaccgctgacgagcctgccgaggatctgctcctgacacgtctcgcagtgaatgtcgccgccgacgccgccgccgttcgcgggtgcgccgttgcgcagccggcttgtctcacgcgcggccgtcgacgacttcgcctcgaccgcaggcggctctgagggcggctgttgctggtgcggagcgagcggtggcgcgtctgccgaggacgatgaggctggcgaggctttgggcgaggagaaggagattttgggcccgggtgacgaggcagagtgcgccggagaaggcgggccagcgtcgtccgcgtcgtcgtcgtcggcgaacgtgaacgtcggaatgatgaacgcggcgggtgcggccgaggtagacggcttcttcttttgaggcgtacgtggcgaggccactggcggggcaggagcgggcgttgccttctggtcggagagggttgtcgatgccagctgctcggccagatcgtcgtcggcgacgatggtcggcatggcagggagcacgatggcaggaggcgctggcggcactggcaacagcggcggctgcgatcttggagggtgtgcagcgaccggggcagcagcgaccggaggaagagatggagtgtcagccggagctgctggctggcttgctccagggaaggcgatggactgcggcagaggcggcagtgtgcttggcaacgtcgcagcacgagcgattccgcccgaaccgttgttggccgagccaccgacgaggctcgcccactggccaggcccggggctgccgttcggtgcggggaccgtgccgcggtcgagcgactttgaagggaggatgccgcccgggggccgaggcaaagggcgacctgtcgatgcggtcggggccgctgcggctgcactcgacgaagacgctggcgcaacagggactgtggtctgaggtttcggctcggcggtcgatcctggtccagcaacgagcggcgatgatggcctcatggacggaagcggtgagggcgtcgagcgcggcggcggctcgttgctgggcgacggggacggcaatgggcgaccggccgcggcgtgtagactcgttggttgcggcgacgccactcgcaaaggcgccgccactggcgtgctcggccgctgaacatcggccggtctagcagacgcaatgccgtggtaggacgacgtcgggactacaaacggcgatgagggcggccgtgagcctttagcaaggcctacaatgggcggcagaggcagcgaaatggcccgcgccggaccggtcgggatcgatggcaggctcggcgagtgccgatgacccatcgaagcggccgcgcttgagcgggaagagactgatgtcgacgatactgcggagggtaagggtgacaactcggagggcttctgggttgggtagcgcggttgcgagcccgctcgactgtggctccgctggtaaggcgactgaggcgccgagccaagcggcgtcggcgtcgaaacttgagcgcctggtggaggtgaaggcgatgcgtaggacgacaagggcggattcgagattgagtggcggtgcgtcggcggaggcagggcgtgcggcggctgcggagggttgcaggcaccgtgcgaagtcggcattgacgggtagggcgcatgcggctgggtatagaccgagacgggctgcccgttggacagagggtgatgcgagctcgaagggccagcctgcgaggaaggaggctgatagtaggctcctggcggaggcggtgtcggcggcggcggcgtcacgccttgcgctgcggtcggcgagttgtagcctggcgttggctggaaaggctgaggcgcgtatgcgctaggagttggcggctgggatggccatcccgagcttgatgatccgtagggcgcctgctggtggggcgcctggtgcagcgatggctgcgcggatgcgtaggcagagtatgccgcgtgcgagtgcgagtgctgctgctgatgggctggtgcgccagaggccgcatacggttgcggctggtgctgagctggagcgtattgctgctgctgctgctgctgctgctgctgctgacctccatatgctagcctcggatcgatagcatactgctgctgttgggcccagccctgggtctgaggcagctggccatacgaaggtgagctgggaggaggaggcgccggcgccggcggtggctgcgtcccggcctgagcgtggcttccatactgcgacggcgcttgaccggaagcagtgtactggtacgctggatagggcgtcgctccagacggcgagtaaggagctgcattgagacgatacatgccgagctggtcagcgctagctccaggtcgaagaggggcgccgaggcgacgaaccctgctgctgctgagagtaggccatcgtgccgcgcgcttgggaccgccttcgggaggagcggcactaggcgagtgctacagatggaatagggtgcgacgcgatggctagagctgttgtatgatccttgcgagagtatgagcgggtggcggtagacgggtcgggaggagcgactgcacgacgaagtcaacctcccgccggccggccggttcgacgcgtcgtcggccaacgcgacccgacctcttgcttcctccagcccccagctccctcggaccgagaccgacctggaagtgcaagcagtgcgatcgtctcccactcagtcaggccagcccatactgctgtgggtgcccgtcgcgtccgatgatcgtcgcgtcgtcgtcgctgaccccactgctgctgccgccgccgctcgcgaccttcgcgacagacgctcgctccaagactgcacgatcctccagccgctcaggaattgccttgtcgcgacgattgccttgtcgcgacgaggacttggtgcgttcgactcgtattgcgcgcttgtgctcgacgaattgcaggtctgacagaaatctcttcgatgtccagcagctagaccgcctcgcgtgctcctgacggctgcatccgcccggcccgacctgcctgaggccgaccatggtgagctcgccttgaccttcgtctcgcctgggtctgtcgttgatgcaacgctacccgtccagtctggccttcgagatgcggtcgcctcgagctcgacatcgaccctcgtgccgtcctttggcgccatggccctcccctcagcgaccggcttgtcggccgctgtcgagctagccccagacgcgacgctctccgaccaggcaaccaatggccacgccgccgtcgtcccttcggaacccgcagggccacctgcagacgaactgatcgacctgtacaagcggacacatgccgacttcttcgcagcctgcgcgcccgagccgccgctgtcgtcactccagtcgcgcgaccaggcctcatacttgctcgccctctcgaagccggtcaacacaaaccactctgccttttttgacccggacgacgacctgctcgttatcgactcggacaccgacatgcccggcggtgccggccgagtcgaggactcgttcctcggcggcggcgagagccggacgtcgagacgcgacgcggtcgcggtcgactatacgctaacgagcggcaagtttggcttcaaggagtggagctcaacgagaatcagcgaaccgagctacccagagggccaggtcgcgatggagccgccctatgtctttgcccggccggtcaagcgcagcgttgcaggcgccgacgagaaggtgcgcgcgcactctccggctctcgcctgatggtcttcgctgacacgggcccttctcgcagatcatgacctattacccgacattcgcggtattaaatcctgcaaaggcgccctttgatctgcagggctacgaggagatgtttgaagaggtcgagcggacggaccggcccgaggcattccccttgagtgcgcagcacgcgcacgcatccctccgtgccgtgctctttgctgacgacaagttcgcctggtcttggcagtcgacaccatctgctacgagtatctcaaccgggtgctgctcacccatccaaagattgacctcaagtacatcgacagcctctccttcctgccgttgacgacgctcgagatcaccaacctgcggcagcacaatgacatgctgcccttcccttttccgaacccgtcctccgagcgctttcctgcgccgacgccgccaaaggtcgagggccagaacgcgcgccacaaggcgatcgacgagcgctggcagccgggcgagacgacgcacagcggcgtcctgcgcgactcggagggcatgttctgcccgctgcccgcttgcggcgagtacgactgccaggtccacagtcagtcatgcgttgtcttccatttgagtgacttactgctgagactgactgcacttctccccggcgccagctgctcactgggaaggcatgggctcgtacgtcacgccgaaggacaagggctcgccaacgcccatctcgtccctcttcctcaaggtcggcaaacgggcttgcgggcccaattgcttcaccaagcatctcgatccaaaggtccgtcttcgcgcccaggcttcttgttgtcgtaactcatgccggaactgctatcaggatcacagcacgggcaagcgcttctcggacatcctcaacgaagtcgtcggcaggtcggctgcctggccggacgaggaggtcgagcagctgatggtgcttgtccagtcgatgccgacgctgctgccgtgtcagatggtcgacgttatcgtcaccgacgtcggtctgccaaagtacacttgctacgacgtgagctcctgcgtggctgccctctacagctgtctacggtccagctgacgcccttccttcgccctgcgcagtacttcctccaacgctgcaaggtcatggacctcgtcagccctcgaccgtcgcacaccctgcccgtcaagcggccgaaaaacggctggccgaacaagaaggcggtcgtcggtgcgaccggctgctccgtcccctgcactgcagagtttcgactgacgaggttgatctgcctgcatgtcgacagttcacaatcatcaccacatgcgcccgtgcgtgacgcgcccgagcaggaaattgcacggcgaaatctccgactgacgccttcttgcgtcttttaccttgacagcacccgaccatgcaaccacgagggcccatgctcgatcgcccagtgcgaatgctacgtcaacaaggtcaactgcacgaccttctgccactgctcggaacgggagtgcacccgacgctttcccggctgcaactgcaaagtcaagaagaacggtcggccgtgccagaccgacgcctgcaagtgcttccaggcgggccgcgagtgcgatcctgtcctctgcggcaactgcggcgttcgtggtacgtctgcagtcagtattcagcgctttccattgcgacctgacagccgctcgccgacgacgcagaggaggggggcacttgcggcaacgagtccattcagaaaggccaaacgaagaaagtgcgcgtcggcccttccgcgcacggcctcggcctctttatcgcgaacggcgaggagatcaagaaggacgacttcatcatcggtgcgtgccctgctggtgatgcctacgtcgactgcgccccccctgacttgcccctttgacctgcctgcgtgcagagtatgtcggcgacgtcatctcggagaacgagtcgaaccggcgcggccagatctacgaccagggctttagaaactaccagtttgacctcaacttcaaccagtcggttgacgcctaccggcgcggcaacgactcgcgcttcatcaaccagcccgaccaggaatttcgacggcgcgatcgggagccgaccggcgaagcgggcgaggcaaactgctacccgagaggttcgtctcacatctgtgcaacgcctgtacttcagaagctgacagtcaggcgccttccacagtcgtctttgttctcggtcagcatcggatcgggctttacgcccgatacgacatgtcggctggtaccgaggtcagcttcgctctccttccctcgtcgcgcggagaggcttcgactgagacgtgcctgctctcgccctcacacagctcctcttcgactatgggcagcactttgacccgagcgcggcgcctgccaagggaccagctgtccagcccctctactacgacgatgactatgcatagaatgcgacggaggatattcgaatagaagtacgtgaaagacgacggcagctcagaagccgtcctcgaagcccgagtcgtcctcacgctcgtccttccagccgacagcccagcggccgacgctgtagaggacggcgccaaaccgctccctcgcgctctcgtcaccctcgtcctcgtccgagtcggcaccgtcgtcgtcttcagcggcggcagcggcggcagcggcggccgcgagcgtgtcgagctggtggaggacggccctggcgcggagcgtcgcttggagcagcggcttattgggcgccagagccgaggccggcgggatcgacaggagcgcgacagaagcgaaatagccgaggaggaaggacagcgtcagattgagctcgctcaggaggaggtcggttgatgaaggaggggcgacatccgcgggcagtgcgttatcgacgccggccgccttgacgccggcgaaggcaagaagagccagggcggcctgacagggatgctgacgcccgcgacccttctcgccgccgagcacgcaaagcacgccagcctcgaggccggccgtgtcccgctccatgacggcccagatggcgcgcgagacaacgacgagctcccacgcagcactggctggcgacgtcgcccgctcgagggcggcaagctcgagcgcgagcgaggctcggtgggcgggagcgagcgggttcgtgagcaggtggccgaacggatgaccggcgtcgtgcggggtggccgtcgtggaccagatctgagacgacgcagccgaagacatcggccggcttgaccgcggagcgagcgcgccaaagacatcggcccagagcgccttgaggtcgcgcagagcgagggcgttaccgatccgagccttcacgccagcctgccggtcggtcggagccgacgtaaaaatctcggggcagacggcacaggcttcgacgagtgacagcttgaggatctcctcctcggcgtcgccgccgctgccgtcgtcgctgacactcgcctgagcgtgcgaccaatgcttgacggcctcggcgggaggctgggcgggtgcccctgcgagggcgtgcgagagcacggcaagcagaatgtgctggtcggcctgaggagggccgcccacagacgacgaggcgcccgagcgaacgaaagcggcgaggcggcgagcaaggaacaagagaagcaagtacgacgagaggtcggtcgctgcagacgaaagaaagcagagtcagcgacggagccaaagcaggggaaagcagcacgaaaggacgaacgaatggccagcgactgctcggccagcgagacccaggcccaacgctcgcggtcgccgttctcgctcatggcgggagcctggcggctcagccagcggaacggtgcagtcgtgccaacgagcttgcggacgacggcaaaggtactgtcgacgccgagcgcttgcttgagagttaggccgccgtcaagagacagaacctcctcggcggattcatctgttgcccgttcagcggactctgagtcgacactcgccgccaaacgaagagcgctctcgatccgagcggcacgttgggcggccctcgagcgcgagacgacgccagtaatccggcggacgaccgagaagacgagccaagcggcggcaaagagggcgagcgcactgagcacattctcgaccgaccacgccgggaccgtagagggcgtcgatgcaaccggcgaccggcggaggagcgtccggccgataatgcggccgctcttgcggatcgcgcccgcgtcgtcgtcagcgccatcgaggtcgaacgtagagacggcggcggaggacgtcgaggtgagcggcaggccgacgccgagaccgaggccgagcgcgagcatgaccttgccagcctcctttgcgccgactggtgcgccacctttgcccttgccagcggcaccagccgccttcagctttgccggcgcgcccgacctcgccttcttgcgcttcggccccccggcggtgccgtcctcatcctggtcggcgtaatgcgggaagctccgccagagcgagccgtccctgatcgcccgaaggtagccgtcctcgagctcggtcccttcgtcctcgacctcccactcgccccgcaggccgcggccgccaatccggtcctcgagccaggcgctgaagcgccgctcggccgcgcgcgactgctggaggaggaaaatgtactcgcgcgcggccgtcaggacggtcgctttgccctgcttggtctcgcgtacctggccgtcgattaggccggttgcgggcgagggcgtgtcgagtaaggctgtcaccggcgtcgtggtgttgctgcaggaggataagcaagatcagcctgagctctcgctgcttgaaacgagcgtgagacacgcacaagagcacgcggaggacgggcacagagtcacgaagccggaggtgagcatcctgaatgttgtcgcggtacttgcgctcgatcgcgttgtggtccgacactggctttgcgccggcagccgcggttggagagccagacgagccgcccgaggaagaagccttacgcttgagcggcgcagaggcaggcgctgaggtcggaccgggggagacggtcgaggcaggaagacctttgccggtggaggtcatgctggaggaagagccgggcagggcagttgccgacgccgtggccgggaacgtctggttgttctcgatgtgcgacagaacgaaggacgggatggcgccagtcgcttgagattgctgtgcgtgctgcagcagttgcggatgctgcgacggctgggcgatggatgcctgctggcggaaggaggtaggcgggccgggcaagaaggcgttgttggtcgtcggagcgccccgcgcagcgaggtcatctggcaggggcggaagcgcgaagcctgtaaggtctagaccgtcaaagaaggggtcgacctgctgctgctgctgggcgtaggcgccatcggtggaggaggggtgcgacgcgttcgacccggttgaaggcgacggcgcgaacgcgtactcgctcggagacccgccggcgataggatcctggctggccgatgcgccccagaagccaaagtcaccagcccagcctccactggtcgactggccgacgggaccgccgctgccgtcgagaccgaagccagcgagcccgccgtcgaacaggtcgtcgacgccgcctgcaggcgcagcgaggaacgtcgcctcggccccggtcgtcgcgctgtagacgctggcggccgacggactcggcgcgctacgcgacgacgagtcggccgagtcggactgtgccgaggacgagccggtcgagggcgaaggtgccgacggcgggaggtggaaggggaagaggctgaagccggcggcgtcgtcggccgctgcggatgacgggaggtgcgagtgggggctcttggccgtgtagccggcgcggagcagggggtcgtcggcgagaaagagcgaggcgtagtcgtcctcgtcgaacatagtcgatgctaagggtgatgggtgttggtaggaaggagggcaggggtgcggccctgagtcgttcgacatgtcgctaaccctaaggcgtcgctggatcgacccactccggacgagcgggtgcgcagtcgccgaggctgtagccggacttgggccaacaatgccctgatctgggcgtgatctgggttcactctgggcttacgacgggacgcgccggtcagccctctccctccccctcccttcgccctcatcatcatctctcctccctgcccgccgcgatgggtctctcgtcggtcgccgtcatcgcgcagggcgcgcccgtcgtcgtcgagacactcttcaatcgtccgtcctccaggcaccttgtcgctggccgggcccagcatgacgagcgctgaccccagcgtcgtcgtccttccatcgcgtctcggttccggaccacttctggcagactacttcaagcacaagaagacggtcaagtgcgtgctcgggaggctgctctctttgagctgaatgatacatcccgtttggacctgcagcttgctgacccgctcgccctgacctgcgccttgccaccagggactcaactgcgcggagcgagctcctgtcggtgccctcccctatcctgaagcgctgctcgtctgggccgactctgacacatgttgctccctcggacctgcttgccatctctctcttctctctctctctctctctctctctcccagctatgacgaggccttcagtgtcatgaaggtccgtcaatcgctcccgggcagctcagctcgcacgcgccgccgccccgtctcgctgacgacgtcccgatcttcccgtacctcgccaggccttcctcgagatcgccaccaagaacacggtcgaggacctccagcgcttctccaacgctcacatgccctcgccaccctcggtcctcgtcgtcccactcctgatcccgctgtcgacttgccggctcgcggccgaccacctcgtccgggcgtttggcggcgccgacgaggcccggcgcgtcgtcggcggaacagagtggtggcgcgtccgcgggctcaagggcgtcgaggccgagtggatcgtcggcaaacggctctgggctgagcgcgagaaggaggagaagcggcgcgagagcgcaacccacggccagaagggcaaggcaaaggcggacggcgcatcgactgctgacgccgggcttgatcccgatgaggaggccgacctcgacgagcagatggccaaggagggcatggacgacatgcagcggacgatgctctacatccacggtgtcagtctacagtttgatcgcgttgtgtctgtacacctgctgactgccgttgtctatccgtctttcagggcgcctattattgtgagtgccgtcgcgtcagccgcactttcccaccgctcccgctaatcagctttttttccgtagggggctcaatcaacacgcaccgctacacaatctggcgttacgcgcgcaagatgaaaggccgggcctttgccgtcaattaccgcaaggcgccacagtacccctttccgtgcgcactccaggacgcgctcgcggcctacctctatctgctctacccgccggcggaagccaagcataaggcgatcgaaccggctcaaattgtcgtcgcgggtgattcggccggcggcgggctgacgctcgcgctcctcatggtcctccgcgacgccggcctgccactcccggccggcgcgatcgccatctctccctggtgcgacctgacacactcgttcccgtcgacgatggacaactttgcgaccgacgtcatgccgccctatggcttcattcataagccgagcacgctctggcccccgccagcggccgagctaagcgagcacgtccagcagacgctccgcgagagggtccgccaggcggtcgaccgcatgacggcccgcggcgacgacacggcgagcgcgagcagcgccggctcgagcgacagcgaggtcgacgacgaagacaacgactttgacgtcagtgcttcggctgctagccggacgaacccggcggcgacgacgacggctaagggtgactcgatcaacctcgacacttgcaccgcggcggtcaagggcgacaattctacctctgtccacaacacttttgtcgggaccgatggcctctccaagagcgaggcctcgcggaagcttaacccgcggacggagggcggcaaggacgaggagggcgaacgaccaccggcgaccgagacggccgagcgcccgcaccagaatgcggtcgacccgaccgacggtaaggacctcgtcattgtgattgacggcaagcagcagacaatcgtgcgtcctgccttgcaaaccgtctcgctcgctcgctactgcggctgactctcagtcgacttttaccttgcagcgcggccaaatccagcacctcgcagagaaccggctgctgccgcacccttatgtctcgcccgcctttggctatctcggcggcctctgtccgctgctcgtcctggcctcggataaggagctcctgcgcgacgaaattatgtacacgtgcgtcgaggggtgtgagcctcctcagaggccgcaggcgagctgacactcgcttgccctgtttgcagggcgcacaaggccgctcatccggacaagtaccccatcccatcgcacgtcatcaagctgatgccgcatctcaaagacatcaacgagcgctttgagccgacccaggtccacctccaggtctacgatggtcagtcgcttcgttccagactctctcgccacttgagaactgacctggttgcaatctcgcagaggtctgccacgtcctcccgctctactcgatgacgacgccggccaagtacgcctacagatgtaggtctcgatccgtctcgcgcccgtatcgtcgtgctgattctgactgtgccgctctcgcctcggccagctatcgccaacttctgcaagtttgtcacgtcgccgcagacacggccaccatcgccgaattctctctcgcctgctgtcagcgcggccggcgacagtcccgtgccgagcctacccggcacgcccgacggccggaccgagagcgaggagctcggcccgaagctcgtcttcaccgaaaagcacctgacggcgacgccggcgccgtcgatccagacttcggcgctcgagggccttccgccgctctcgccactttcgccgctcgacagcgacgacggccgcaaaacgccacgctcggcaggcggctcaaagtcgtccagcaatggtggccggcggcgctggctgacggtcgacggctcgagcagggctggatctggagacgtcgctggcccgcgcttccaggacccaaccgaacctccgccgccagaaggacccgaaacggccggtcatccagccgtgtatgcgacctctgccggacagaccggcgacccatttggcgagggcaacatgatccgcgagcgcgtcagtacgcgcggccttcggcgaccgctagagcccgaggaagatctgccgggcattcacgtgccattggacgaggtcgccaggatcaaggagctccctgccaaacgatatctgaccggccagacgctctgtacgttcggctgcggctctcgacgcgacgcaacccgctcgctaaccaacgttccgccgcccgctctgcaggggacaagaaatttgcgcggaccgcgcgccgcgtcgagcgttaccggatcaagaacctcaagcggtcgcacaaggaggcagcaaagtcggcgcaggcctggcacgaccggatcgcgcagggcgatatcgagctcccgaagcctgtcgctggcgaggagttcctccttcgcgatggggccggctcgcagtggaactgggcgctcaagggcgagcgtccgcctccgagcgccgtcgccgggcggcgagacaccagcgaagccgtcaagctcgccaagattgcagaccagacggaccgcggcgagtcaaaacttggcggactcaacctttggtgcggcttttaaccttccctctgcctgcttggccgcccgctgacatggccttcaccccccacaggacgaccgcgatggatctcttgacccgctcgtcaatcagcggctcggggacgcggacgccagcgcaagagagtcacgctggagcgagcgcttcttcgacagcagcctcctcgccgacgtcgtcagcccctcccacacgcacgtcgcaacacaaggcgtcgcccctgtcggcgcctgcaagcggctacgcgtcagacgcggatggttccgacctcgacggccgaggtccgatcgcggcgaaggcacagagatcgggctcgcgattcgccgtcccgggcttcatgcggcgtgtttcggcgaccagggttgacacggcggtcgacggcggcacggaaggcccgaagatgaattgatctcaagtagagcgaccgcggcggcgagcgtgtatctgcatgtggacctgttgatttctgcaagggctgtcgaggttgtggcacggcgcgcgcgtcgaacgataggggggtcgtagatagcgagcacagactaagagtagggcggtcgtcacaaaggcgggcaagaggcgtgacgacggagacgagagaaggtggaatagagcgctaggtcccttggttagggagacgtttgcttgtcgttgctgtcgttcaaggaagagggatcgacaggttgactggcgagacctggacagaataggtcggcaggtcgtgctcggcaaagctgagggacactaagtcagtcgagcatcgtagtgtcaagaaactggggcagacgcacaggttgaagtggaaccagtcgagcggggcgtcaaagttgtacgggtcggccatgttgtcgccgccctgctgctgctgttgctgctgttgctgctgcccgagccctggcgaccgggccattggcgtctcggacgctgggaagaggatcgagtgcttccacatcggctgcgaagcatcgccaaagccgctcggcgtcattggcggcggcattatctctgccggggcctcctttgggctatgctggacgtcgtcgttgtcgtcctcctccgagtcctcctccttaagggtcgcgagcgcctggaacgccgtccgtcgcatgtcggcgctgtagtgaagcgtcgggcagtcagcacgttaatcgagcccgaaatcaagccgactgaactcacagtacgctcgacgtcgagtccttgcgccggaagccaggaccctctggcggtgactcggggacgctgtggtcaaacgtgaaattgggaatcggctgccgggcgtgcgactcgttgagggcggcagcaatgatcttggcgtagcgctctacaggagaaaaatgggtcagaccgagctgattggcaggactcagaagctccgacttactcgacgtgctccagtaggcgcccagcgcgttgagcgtctcgagaaagacgatcgtctggtcgacgagtaaaggggtacgctgtcacgaggagggagaaggtcagcagacgacgtcgtcgggcgagcagcgagcatcaagcccaccttgatgaaggcatgcgcgacgaggccgcgggcggcgatccagataaaccaggtgaaaatggggttgaggtcgcgcgaatcgatcggtcctggagcggtgcccgggcgcgaaatagggtgttcgccgatgcgcgaagcgagcttggccatccggtccgaggcgccgacgcaagtggctgcggcggcgtctgacggcagaaaggatggcgacgagacgggcgggtaggcgatggctgaatgcagccggaccgacgtcgcgaggtaggccgcgaggacgagcatcttgagcccgccctcgccttcgctcgcgtcccagtcgggccgctcgaccgaacggattgcgagtggcagggcggcgtaccaggcgagcagctggtccgacagccgtcggtagcgctctttccacgctgtcgtgtctgcgatagatgagaggaggagcggcgcgcggataaaattgtggacctcgccgaggatgtggatgatcgagcaatagtacgcgtagtgcgagacaggctcggcgccatcggccgcgctcggcagaggttccgtcacgagcgggttgaagcgctgggcagcgcccatgttccaagcgccgtcgcgcgagggcagccggcggtggacgtcgtctgcgtcgaacgatagggcaaagccggtcgacaagctcgcgtaggtgtcaaggcagaagatctgccaaaagagccgccggcgctcctcaatctcctgccagctcgtcgagaccttgaagagcgacgtctggctcgttgcgtggtagagccgcgagccgatcttgtcccgctgctccgggtgctgagcggcccatgcgtcttcgaccatccggtcctcctcgccgagccggccgtgcgagacggcgcccgtcaggagtgagagagcgccaccccagcgttgaggtccgccctcttcgtgaacccagccgagggcgaggatcgtcagcgcctggaggttggcgatgctcatctggttcatggccgccatcaggaccgtgtttttggcgacgccggcatagtgcgactttgatgtcgaagggtgtatgctgaagtgggcgtggtccgagaagcgtagtgtgacgaagacgatggcgtggatgaggacactcggtgacgaggatgaccgcgtgcttgacgacggctgcgagggtgagtgagcattaaaggcggcgccggacgagacctcgtcggcgtggatgacgagcggcgaccacgggtggatgtggcggtagtagagcgtgacgagctccgagatgacctctggcggcggcagctctgagcccgtctgccggaacgaggcgggcgagaagctcgccttgccgagaccggggccgaacgaaggtcctgcggtgccagccgccggccaagagcttgctggtgccgtgggctgatccagcgagagctgcatgctgttcaaagacattggatggaggttgtcagctggatgagcgctggagcgttatggtttaggcgaggcgacgaacggtgggtattgatgggtctgggaagagcttcgccggccgagctgcttcatgagttgctcgccgctatgtgcagtagagaggccgagtcgtcagcgacagatgcgcgcgaaggaggacgacacgcggattggacgcacacatcgttcgactcgcgcatgtggacgtcatcggcggccctgccagtgctcggtccagtcgcctgcgagaaggaaccggcaactgacccgctcgcaccaaagttggcctcgttgccgttcataaagttgttgccgctgaggccgagaagcgtctcggctgccgtctgcgggctcgcaaacggcgcattgtgcggtgattgctgctgctgctgctgctgcgacgcagggtgggacgggcccagaagctgatgctgctgttgttgctgcttttggtgctgctgatggttaggctgatgaagaggctgttgcgagctgcggccggctggtattgggaagaggtggctcggtggtgggaggtgctggtcgagcagtgtcggatgcagcgatgtcggagtcgatccaggcggcggcccgaggaagccatcgaatgagagcggcttcagcggcgtactgcctagcacatcacccatgtccgattgctgaggtcgcctcgagtgcgacgacgaggccgacgcgggcggctcgagcccgttgattccgccgccgtcggtctgactgtcgtccccggccatcggactcccgacgctcgacggcgacggcgacggtgcctcgctcttgaagcgctggccatcgtcaaccgagctcgagtcgccttggaagccgtgcggggcgagaaagtcgcgaaggcgagtgagctgcgcctcgtgcgcgcggattgatgtctggagctccttgatccggttgtcgacgttgccagctccggccttcaagcccggcttgagcttggcgcggtactcctaagaagtggatgggtgcgtacggttgtaagaatgtgagtgagtgagtcgagcgaatataaggccaggagcgaggctgcttacgcatacgcggcctgcagagcgacagcaagagggagagatgagtggcaagtgtgtcagcatcgaattcaggtacgcagtgatgccgggcaggcaatcgaccttgcttgacgcagttgtcgcaccgcggcttcctgaaggaggacgagcgagggcggaggcaggccaagggtcgtcaggacgtgtgcgatcgaccggcacagaaggcggcccggagcggaacacgacccgctcctagagccggatggaggcacacagcccatctggtggactaggtggctgcatcggacgggaggagacgtcgcgaggagggacgtactcgccgccgcacttgatcttgcgctcccgacagctgtctgcaaggagaggagacaaaggagaggccgggccgagctcgttggtcagccacgaatgcgcagcggaagcaagcaagtaaagctccgacgcactgcagctggatgggcagcggatgggcgacgacagggggtggtcagcaacagcgatgggagaggcggcggcggaagctcgtccgggagaaggcgggacgcgaacctcgcggtcaacggccggtcgtgagccgcatcgttcggctggcctgacgagctcttgcgtcggtcggccggcatagcgagagacagacgcgaatccgctggaccggaaggcggggcaggctgggcaggcgggggaggcgtcgcgaaagggggtcggtgtcggcttgtccgaaagagcgagacccggtggaaaggttgggccgagggctgacttagggttacgctggcaccctggcggaggcagacaaggacgacggctgcccgtcacgagcaagagaccagcaagtagttttttcactgaccgcttcgcatgcggcgccggctgtagatcgcagtgcattaagagtagcaggtggcagagggagggacggtgtcaaggcaaagcgacaggtgccgagcatgcgggcgggcaggacgagcaaacgcaggaagaaagagatacagctcggaggttgagaccgacagggcggggagacgcaagtgctacaaaaaggacaagatggcgggagaggggaggaaggaaggcgacgggtcgaattgtccttgtgagagcgagtggtccgataggctctctacgccgacggccggtgctggtagccgtcagtgtactgctgctgctgctgctgatattgctgctgctggtaggccggttgcgattgcggaggcggcgtgccgtagaccaactcaaccttgcccatgcccgtctcctcccagtcatcggcgacagcctcggcgtccttgacgaggttctcgagcccctcccagctctggagccggtcgcggaggacagacgagtacgtctggacgaggttgcgcgcactcagcggcgcttgcaggccggagccgtcggtcggaggctcgcttgttgtcggccgaggcgaggccgagagagaggcagagttggtcggcgcacgcgcgccgttggcgcttgccgtggcggcggctgcggtcgctgctgctgctgcgctagcaccgttaacaaccggttgcgagagtcgacggaacttgttgaggagctggttggcgttgctcgtcgcctgtgcagcaccgccaccttcgttgttgacgacatcctgaaacgatggcagcttgggcgccaacgacggccggcgaccgtctggcaggatcgtagtcgttcgcggtggcgatggcggggccgatagcggcggcaggacattagacgaggccgagatcgagttgcgaccgtgcgagaacgactttgaccgcgattgcggctggcaagctatgacgacgagcgaggcggccgcgctgtggagccgctcgggcaacgactgccggcgagcgtcggtgaagccgagctgtgccgttgtgtgcgggtctgactgggcgcgatgcggcatcgccggctggacgaggatcgacgccgccgactttggcgacaacgcaatggatcgtcgaccggcattgaagctcggcgggagcggtggtgggccggcaaagggccggggctgcgcagactgtgcgcgaggggacgacgtcggactgccgacggccgagtgcttgcgggtcatgcgtgcggcagccggcgatgcggccgggttgccttgcgtctcgaggctcatagaccactgcgcgtgagtgacacagagtgaacgggatcagtgagggcgctcgaggaagtgcagacgacgggacgcacctcgaccgaggcctcgcagaaccgctcgagccgctcgaccgactggcgcagctcctcgccctggttgatgtcgacgagcttgcgggcccggtcagggtcagacggtaacttcccgagctcgtcctggccctcgtcctcttcgacggcgcgctccgcgtctgcctcagttgctgtgtccgtcagcatcgacgaccggcgtcgagggtcgtctgcaaacgtcgtcgacccccaaacagcgttctttggccgcccgctcgaccgaggcgagagcggtgtcggcgagtggcccgccgaccggtccgacgagccgaggtcgcccatcgaccggaagcgaaggcgcttgccttccatgtagacggatgggtcgtccgatgtctgctgctgctctggggcagtcgcgcgccggcgcttgaggatgcctttgggcgagggcgagtagagcggcgtcggcggctgagtagcagcagcgcgggccgggaccgacaggagggcctctgcctgctgggtcgttggggcagaggcggcgtggccaggtgactggctgccggaggacgacgccgaggacgctggtgtggtcgaggacgcggctgttgttggcgcaggcgctggaggagctgttgctgctgttggcggcgagggtgacagactgggcgacggttgtcgacggacaggcgaagagggtcctgctgctgatgttgcggctggctctgcgacctcgtgccgctcgtgctgttcctgctcctggccggtctcctcccgtctgctggccggctctgcagccggcggcgggctggccatcaagggaggttcgggagaggatcgaggccctgagctttcgagctttggctgaggcgagcgggttggccgcgtgggcgaagcgagggcaaggatccggaggggaggagaggacgttcggggggaggtaggttgaggacggccgtttgctggttagggcttgcctttcttcgttcgttgcctttgtcgctcgccgctctccctcctgcgctggttgccctcctctcgcgcgctttggggagcaagtctgaacgggccgggctcgttgggtttggcagtcggtcgagcccgttggtgtttggcaacccgaacccctcgagcacgagagcctggaccgtctgggggcctcgcctcggcagcagggcgccacgccctcctccttttttgtcacaaacagggagagcacggagcgcacgggaccgctccctcgggcagagtcgatggcaccttcgatgccttccgctgttgctgattgagagccagccaggcggacgggtcgagaggggttggtcgtccaacatgcggcagctcgaagagagacccagactactgcctgagctccgacccctcgcctcctccacacatcctcgcctagccggacggccgacgtcgcccttggagcgcgcgccaggtgcgtgtgatgggcggcgcggggacataaaaagataaaaagaaggacagggtggctgggccgagacaaggatcgtcgctccttcggccagtctggaaaaagcaaagaaaggagccgagccccctccaacatctcggcagagacgaaacgctcggcaaactgctgctgctggtgctctgcgacgcgccagccaacgaatccctgcccgaaggggggaaagcgcacccggacgggcgcgacaggccgggcttcccttcatctcctcgccgtagggcgacgcccgaccgaacagctggtaaggccgccgactgtggacggaccagggcttccatcgacggcggaggcagacgtcgaaaaaggaaggctcgtccggcagcagcaggacgctagcgcaagcgctggcacggagcagcggccgttcggagagattcctgcctggccggaccacatccccttctcggatgcagatggtcggtcggccagggacggccgcggccgttcgaacgtctcctgctggcgtttcagcccagacctggccgtcgatcccggctcctgggcgaggtcgtcgtccaaccgccgcgctggaggtctcgtcgtcaccgctcctccgttggctaacagcccagcgtcatcggttcgcacgcttgccaggtcaaaccgtctcggggtgctgggcgcgacacgactcgagcggcaggtcggcgaagcgctgctgcgtcatttatggccgtctcgcatcggcgccgctttcgatggacggtgagagcgctcgcgcgcgcgcaaagggatgacggccgtcacgagtcgatggccgcagcgccggcttcggtgcgacgagtccggaagagaagtcggctgacgacggcggtagagatggtcgagcgacaaggtagggcagcgctgacgacctgaccagcggcggtgcggcgggcgggatgcgagacggagcggtgcgcggtcggcgaggcgaagccagcaccttagacgccgacctgctgacggcagatggcttcggcggcgagggcggcggcgctgggaaggcgtcgaagagtagagccgtcctgccgccgagcaagaagggtcggacgtcgtggaccgaagacgatccgctcgagctgacggacgagggtcgcgcgatcagacagtcgacagttgcggtcgtgacgtccggagcggcggcctcgggtacgaaaggagacgtcggttgcttggtggcctgctgcaaggccaaggccagtcgaaggaccccgacctcctgttcgacctcgactctccgtagcttctcgcgcgcaagctcgtcgagcacgagttggtcaagcgaccggtcgacgacgcctgacgcgacagaagacgccgagggcgacgatgtcggtgtgcagagtggcgtagcctccaagatgccgatggagtgagcgagcaataacatctgcgatggaaaggttggaagcgtcagcacgagtgagcgcgagagcaccagtcgcagacagtcgcacctctgccgcgagcaggtcgccagtgttgcaagccgccgacagcgcctgagcaatacggccggcctttccctgggagatgatggtctgggcgtttactgaagggagcgcgacggccgtcagtcatcgagcaaagacaacgggcgagagatcgcggcagacgcacggtacttgatgcacttgttgcgttgccggcggcagtcgaggaagcggcgcttgatgtcggcctcgtgcgccttcagttgagagagctcgtccgagacgtctccttctcgcgacgctcgagcaggcgaccttgcgtcgagatccagatgcgggatcgccggcagcggcgggttgacgaacgcagtcggagcagcgtcatcgacgacggcaacggcaaccgggctaaaggtcgagcgtgacagcagccgcaggtccgactcgctcgccgcccgagtcatcagcatgccgtctcgtttgtctgcaggtctgcctgccgggaccgacaaggaggaaggcgagctcggagctcggagccgcaccgaccgtgcgtcaatcgacggccgaggcggatgatcgaccgcgccgtacaggttcgggctgaacgcgttcccctcgttctcgagaggcaaggattgccactcaaccggtatctggaccctggagaccgcggtcgggctcggcgcgaagagccggtcgggtgagtcgaagatcgcctgggcggtcagatgagccgggccgccgtcgggcgtccgaggccagccggtgtcgatccgcaagggcgaagacaagtcggcgagtggcggcagggtgaagccgattgcaggaggagggcgatcggccttcgtccggacgagggccggccgagcaacggtctcgaggtcgccgtctgggtcggcgttgtaaagcgagacggtcgagaagaacgagtcggcccgcgagcgtttctctggtggcgtcggccaggcggagaatggagtcggcctgaacaaggcggaggagcaggtcgatcgggtcaggtctggcacggcagagagagaggccgagtgatagcagggttttacacgtcggtcgccctggttgacgtcgtcgccttgcgaagcaggtgcatgctggagacgggtgcgggatcgaacgtcaacgccaaaggtcaaggtccctcttgaggcagggaaaaagagcctcaaggcgggggacccacgagggagcacgggcacgacaggaggcgggagcatggtgaccgggcaagagggcgagatcgggcaggccgtcgtcgggctcggctctacgataggccggaagccaagttctggcacccgcctcttgccttgttcttccccgctttcagacttgcgtgggcgagggcgaagggcgaagcgcgaagggtcgtcggacaggagtgcgagcgtgaaggccggtgaaaggggagccgtcgtatcgtcggcatctgttggccctatcgccaagggggcgagtatgccgtgtcaaccatctcaggatgcaccaagatggatggacagaaggcggaacgacgggataagctgttgagagtcggacggaagactggaagagaggaaggcagctcgagctgaaaggggccgcgcagccgatgctcggctgggaacctcgaccggctgccacgacagctgctcaacgatgacgggtcatcgctctaccacaacccccaaccccttcccacctgctcgaccctagacatgcttccgttgcgagtccgacaccctgaaggcgtcagcacgattagcgtagacgaggctggcgacgtcgaggcgctgctccaggcgctgtcggccgcttcgggcctcccgagtagcgggcttgatggtccgtctctcctaggctgatttggtgactgcagagccggagctgatccttctcgttctcccacctcttacagtcaaggccggctatcctccgagacctcttctgtggacgtcgctcgcccagccattcgcgagtctgaagctgagccgcgacgagcagctcatcgtctccgtctcgacctcgtcctcaggcggctcttcgctcgtctccaacactccggcattgaaacctctctcgctgccgacaaagagcagcgcctcagctgcacctttgcccaggtcgacagcgccacccgccgcttcgccgccccgcgcgcccgtcacgtcacgagcgccagcgcagcccgccacgtcgcgcagcgccgacggcgcctttgtcgaggtcgatggcagttatctcgtcctcaacattgtgccgtacgttgcggtctctctcgaggcaactgcagctcagaggctgaccattcggacatttttctgcctcgcagtgacgacaactcttgcctcttctcggccgtcgcgtccgtctttgaaggagggatcgccgccgcccagaagctgcgcaagggtacgtgagctcgagtcgatgcgagcgctcatcgtctaagctgactgcaacgttgaccctacgacagtcgtctcggctgcgatcaaggccgacccaaatacgttctcggccgtctttctcgaacgcgagcccgacgactatatccggcgcatcgaagactcaaagacgtggggtggcgcgattggtgcgtagttcaggctaccttccgtctcaaccgtcagcgactgaccttgctccttcgtcctctttcagagctgtcgatcttcgccgcgcattaccagacggagattgcctcggtcgaagttgcctccggccgaatcgaccactttggccagggctcgggctacgccaaccgcagcgtcctggtgtactctggaattcattacgactcgtgcctcctctcgccgacgccgacgctcgacaatccagaattttgcgagacggtctttgccgtcggcgacgagacgattctccaagcgacggccctactcgcggccaagctcaagagccagcactactacactgacacggcgacgtttgacctccggtgcggcgtctgtggtcagggactcaagggcgagaaggacgcgacgacccacgcgcgcacaacggggcacaccgacttcaggtgaggcccgcctttcttgtccgccgcccgtctgacgatcgcccgctgacccagccgcgctctaccttcttctcagagagtattgaggccgttctttcgaccaggtcgctgcttgcgaagggttgtactcatgtccgtagcgtacggcgagaagcgcccgagagcgaccggaggcgaggctgcagtcgcagcccggtctgtaacaacgttcggccaatgcttcgtgcactggtcagcacctgagacccttggatcacgagagcagacagcaggagtctgcgagacggtcgatgacgattcacgcgagcctgccggcttgagccgagagcgcacgcgcagcttcacccagctcgcttcaccccgacctcccagcttctccctcaacaccatcacccttacacaacgatgctcgacagcctacctgatgaggtcatcctcgatgccatcgcgccctttctcacccttccgtccctgctcagcctaggccaggttaacaagcacctccgcgccgtctgctccgagtgcgtgcctcgctcgcgccacgcccatcgctcgcccacctcatgaccttgcgacgagagctgactttcatcttctgccactgttcagcaatgtgctctggcgccggcggattcgcgaggatctcaatgtacctgacggcgtgaccgctcgcgaggatggctggaaggagctctacggccggctccggcgcccggtgcgtcgtccgagcctcgcttagatgggtggcctacatactgactggctgtctcgtttgtttttctccctgcaggacgtctatgtttgggggtgcgtcactatctgactgccttcttcactctcgctgacctcgagccgctctccgcttccagggcctcgtccaacggccggctcggcatccgccgcgatcacccggccttccagaccttccacgccaactacgagggcgtcaatcggcctgttcggctgccgctcgattctggcgttggtatcgtcgaccttcatgccagcggctacggctttgtcggcctcgatacagccggcggcgtctggatctggggtcagtcgaggcgcagcttgcgcatgcggcaacgtcgaggaggaagctgacgcaaagcttttcttcaccctgcaggcacgctcgacggcaacgcgttcctcagccgctcacggccaaactggcagacggctggtgccatggcggcggagccacggcacgtgatcctgccggcgcgcgcgcggtcggtcagctgcggccggcggcacgtcctcatcctcgacgaggagggctcgtgagtaccttccttctgcttcacgctcatctgtggcctaactgatctgctttttatggatctccagtacctgggagctgaccggctggggcaaggcatggaagcgcgagctagagtccatctcgtcagtcatgcccgcctgcccctcctcaacgactgtaccgacatgctgacgccctcttgcgccttacagcccatcaatcattcagctcgaggccggctggggtcactctgccgtcctgagcacaagcggcaccatcgtcgtctggtggccaaccttcgagcctctgaccgacgacgagcgctcctcggccaagtggacggctgccctcgccggccgggaaccgggcgagaccgagatcgacgtcgagtttgcggtcgaggctcagcagccatttacgctgcctccgctgcccggaactagtggcgagcctcgtcacttgggcgatcgcccgcaggaaagcaacgttaaggcggtcaagattgcgtgcggcgacggctttgtcgtcgcactcgacaaggatggcaaggtctggacctgctgggtcggcagcagcgagagcgaggtcggacatcggccaggcgagggaacgactagcgtctgggagctcgtgcgttcccaattcgaggcgcaagcgatgccagacccgaattgctgacgccttcttacgctttccagcacagcgagttccagcacccgctcgaggcgcagtcgtctgtgcaccgcatcacgcatgtctctgcccactttgagagcttttttgcctacagcccgggctcggccacagacaacttcagctcgtcggtcgtgctcaaaggcaagaagtcccagctccacttacgtgagaacgagggtggtcgcggcgcaactccggaggtcattcaagagctgcaaggcaagggcgtcatcaaaattgtcgtcggtgcgtgagcgcctgcctgtccttcctttagctgccagcgctgactccgaccaaccttctcacggcaggcgactatcactttggcgcactcaccgcggcaggaaagctcctcacctggggctcgtactcgtccggcgcgctcggtctcggtcagaccgcgcaggtctcgcagccgatcgaggtcacctttgactcgcacggccaagccgaccgcttcgtctttgccgctgccgcttcaggctggcacacgggcgcgctcgtgctcgacctttcgaagagcatcggtgagacgacgcgcgagcgggaggaggaccggcaggctggcaaaattgtcccgacaccgaggcacccgacactccccactcgcccagacacgtctcgcttcgccgcgcttaatccgccaccgtcgggccgtccggtccctggccaaggtggcgtcgtctatccaggcctcactcgcggcctcccgacgcccttctttggcggtacaccagtcgccggtccgaccgtcccggcgccaggcatcgtcccaggtgcctttctaccaggcgttaccggacagccacgtacccggccaggtgacccgaggcaggtgacgcaaccggtccagccgtcgccagacttcaaccctcttgcctgggcgcagggccggttgggcccgggcagccaggctggcgctgcagagcggcccgcgctcaggtggcagggccataggatcgaccggccggacgggagcgaccgcgacgagagggcgaccgagtgaggacccgcttgtgcatctcatgttcgttctgtctgtgctgggtcgtgtacttgtcggtcgtcagttacgccgccctggtttacggcccggcacgaggcagatcacgcaagcgccgccgccgccttcgccgcctgtcgccgctcgaaccctccctcgctccgacacccatctcgtcgcccacaatagcgcgcgccaggctttcccagaccctcagacacctctcgacagtcccgcccaagatgtcgtactctacccgcatcattggtgtccgtccttgccgtgccttcgcagcgagatccagcgcccgtggctgactttttcgcgcccgtcttccgacatcccgatggctcaggctcccaacaccctcggtgagctccttcgtcgcctggagatctctcggctttcgctgacgcgtgatacctctcctctcagagcaccgcatcttcattgagaaggacaacaaggtcgtctcgcccttccagtgcgtccgcgaccctttccatctgctccaaaccgctggcccgccgctgacagccgcctactgctctctcgcctggcagcgacatccctctgttcgccgatgagtccaagaccatcctcaacatgattgtcgaggtcccccgctggaccaacgtaagtcggccctggcgtctccggctgtgtttcgctgcgcccggccgctgaccttcggctgcttgatctctctgtcccaggccaagatggagatctgcaaggaggaggccttcaaccccatcaagcaggacatcaagaaggtgcgtcgccagaggcaggtcccgcgccatcccaagcgggcactcgggctgactttacgtcgcgctggtcacctctcagggcaagctccgcttcgtccgcaactgcttccctcacaagggttacatctggaactacggtgccttcccccagacgtgggaggaccctacccagatccaccccgagaccaaggcggctggcgacaacgacccgctcgacgtctgcgagatcggcgagcaggtcggctacgtcggccaggtcaagcaggtcaaggttctcggcatcatggccctcctcgacgagggtgagaccgactggaaggtcatcgtcgtcgacgtcaacgacccgctcgcctcgaagctcaacgacattgaggacgtcgagcagcacctcccgggtcttgtccgcgtgcgtcgcgcccggcctcgcctgcacagccagtcggcccgtcactgacggcccttccccgtgctctttgctccaggccaccaacgagtggttccgcatctacaagatccccgacggcaagcccgagaacgtctttgccttctctggggaggccaagtcgaagaagttcgcgaccgagatcgtccacgagtgcaacgaggcctggaagaagctcatctcgggcgaggccccggccaagaccaaggactacgacctctcgatgtgcgttctggccggcgtggtctgaccgaggacggctgttgactccctttctctttctctcgcagcgccaactcgtcggtctctggctcgcccggcttcggcgaggccaacgtccccgccgactcgcgtcagcccgctgccccgatcgacgagtcgatcgacaagtggttctacagtgcgctctcgacgatctctcgtgcatgcctgtagcgtgcgctgatgcgctgtcctccttttatcgccagtctcgtccgctgccgtatgaatcgcacggctctgagcccctccttccttgttgcaccgcccttcggctggtcgagtaaacgctctatggatgtgtaccgatggaccaccccccctttccctcgtcatccttcagtcttgaagaagacgacagatgctgcgcgcgcgcccttcacagccgtcgcttctctcgttcgtttgccacgggtcgggacagcgtgctgaacgtctcgagtatctgtcagaggtccctcgttgcttgtgaagacatacgtcgttgctgtcggcggcgtcagcagcttgtgcggtcactcgtccgttctcgccgcccgacgctcgctccggcagacgagcatctctcgcctcagccatcgaccctctccgatacctcgcctctcgacctcttgcaatttctctcacagacacgtactagctacgccggacgacgcctttctcccgggtcccgtcctaatcgcctcgagcccggctgctgcaggacagacgctcggccttgacggtgagcgcctcctcttctgctccctctccggcggccgcgccgcttgctgcccacccttctgactggcactcggctcgacggcgacatctcatcgactaggactcagagctcgcgcgctgacgacacgacctgcctcgaaacagcttcgaccacctcccctctgcatcctttggccgtcgcagcgagcggccttgcctggtgcgtgccggctctttgacttctcgtcgtcgcgcgacggcggagaaagacggccggagctgcccaggaggctgatctcgcctgcttccgccccctccatcgacctgtcttcacagccagaagtctcaccaaagacctaacggccctccctctcggcgcgcccgttcatgtcgtcgtccctctccggaccaggaggcggcgagtcgcgacgctcgtcacccccaagcgcgccgagcgcgaagatgtcagtctgcggcccgaccggtcaaaagcgacctcgaggcgttcgcttgagcgaagagctgacacgtgggctacttctttgcagcgctcgtgagctcggcggcgagcctcaggcctaccggccgcctgcgctccgtaacggcgctctcgcggcggtcggtgacgaagcgctcagtgaccaggcgagcgcatacggcgccggctaccggagggcacgagctgggtgcgtcgcctgatcgaagtgatctctgatctaggcagagatgctgaccctactctccaggactctcccctccaacttgtcgtcctttgcgccccctccgccgtctctggcggccccaggctccggccttgtgggcagcgcgcagccgacgagcggtctcgcaatgaacccggccctgcgtcaggtgctcgatgcctcgggctcgcccggtcgtgcgcggtcaggcagtttgacgctcccttcgcctggcctcagcaacgcctttgggcagcccatcttttcgtcaagcgggtacggacgtcaggtcgcgccgggctcgcggcccccgatgatggagggcggcatgagccgaggctactcgaacgactcgatcgagaacgaggccatgtcgaacggcgtgctcgactacctcggcctggccgagtcgccttcgccgtcatacaaccccattccggcgacactcagcgagctcaaagcgcaagcccagcagcagatccaaaactcgcggagccgggcgagcaccgtctcgagtccttaccgacagcatcgggcgaccctgtctagcagcctcctgtcggatccgctcgccggcgaccaggacgcactcgactacggttacgatgcgccctcgtatccgcccctgtcgcagacgccgccgaacgccttcaagaaggcgacgcacttgatgccgagcagtcggccgcgagcgaccagcgtcggcacactgctcgactctcctcgcatcaaagcctcgtcggcctacgccagcgcgcacgaggtcgacgccgtcgcccagcagatggcgcagcagatgcacctctcggccaccggcccgggccagtttgcgggccagcaacagcagctcatgctgtcctcgctccagcggccgccgctcgaccagcaccgatccgataccaacgtttcggccgcctacctccagcagcaaggccacgcgctccacgttcggagcggctcgctctcgacggccaacactcctcgagcgcatacgcccgacactggcatgatcgtctcgcctccgacggcacagggcggcccgccgcagctcacacccttggcgacgtcgagtgcgcaggtgccgacacggagcctctggctcggcaacctcgacgcggccgtcacgacgcaggagctcatgcgcatcttccacgtctacggcgcgatcgagtcgctccggctcctcccagacaaggaatgcggtttcgtcaactttgtagacaaggccgatgcggttcgcgcaatggacgacgtccggcaccggctcggcggtcgcatttcgaccctcggtgaaggcaagccggtccgcgtcggctacggcaaggtcgacagcgtcccgctcggaccaggctcggtgacgagcccgaccgagcccggcccgggcgggatcacgaacgaggtccaagcggcgccgacgagagcgctctggatcggctcgatcccagccaacacgacgccggccaagctgctctcggttcgtctccagcgcgtagctctctcgtcaggacacagtcttaccttgctcgccctcctttcgaccgaccagatcttctcgccattcggaccgatcgagagcgtccgcatcctgacgcacaaaaattgcggcttcatcaactttgagcgcatcgactcggccgtcgttgcacgcaagacgctgaacggacgcgacgtcctcggtgccgaggtcggcggcgtgcgcatcggcttgtgcgtccctctttacgctgcagggcgctgccaaccagttggagctgacattcctaccccctctgcagcgctcgcgtgcccgtcaagtctggctcgcctgataactcgagcgcaggcggcatcggcggcatgtccgtcgcggactcggtcagtctttgcggtgcttctcgaggaaattgtgctctcgctgatggcctttgatccttgcagatcaacgctcttcggcagatcaagggcgcgtcggacgtgtttccggacacgcaggtcctcggtggtgccgtcgacgactatcggtcgaacctcgtgctcaacatggtccaggccggcgagctcgacggcgtcacgcgcgatgccgcgcagagggacccggttgcctgggcagcgacggtgaccgagcagcagctcatcatgcgcatcatcggcggtggcgacccttcggccgacgcagacgtcctcgccctcgccggtcaggcgcccaccccttttcttctggaacgactacaaggctgacttcaaaacctgcccgcctgacagaattcccgcagccggcgacgtactactcgacgatcccacaggtgccagaccgggccggtcagccgcggcggtacgacgtcagcagccttcgcgagaccaagaagcggctcgagatggccgggggccagggcccggccgttttcgacgagattgccgtcgacctgcttgacgattgcgtcgacctcgcgagcgatcgttagtcctgccgctgcccgacacacttaccttcgtgtgctgactgccgcctgaccgccgcagacatcggcaacacggtcattcagaagctttacgagaactgctcgctccaggccaggcttcttctgcttgagcgaatcgcgccccatctcgccatgatcggcgtccacaagaacggcacctgggcggctcaaaaggtgcggcccgtgcggtcctcacgcagaaaggaacagcgagctgatccagtctgcctcggctcggcagatcatcgactgcgcgacgacgccggaggagatcgccatcatcgcgcagaatctgcggccgttcgtgccgcccctgttactcgaccagtatggcaactacgtcggtgcgtcgggagtgggcttgtctctccgccttcctttgcgctgacggccgctgccctttgtgcctgccgcagtctcggtctgtctgcgcttcggcccgccgacgaccggcttcatcttcgatgccatcatcgcccgcctctggggtgcgtcgtcatctgagcagcctgcttgccctattcgccttcggagctgacattgtttcttgccctgatggaacagacgtcgcgcaaggtcgcttcggagcgcggagcatccggacgtgcctcgacagtcctagcacgagcgccagccagcgggtacgtcccatctgacgatcctttgtgcgtctctgctgatgaccgcccgcgcctttcacagcgcaaggtcgcggtcaacatcatcctcaactccatccccttagcgacctcgccgaacggcgcgctcctcgtcacgtggctgctggtaagtcctgcctgcggcaccccaagcgatgacaggagctgatccactcgtcctttgccgccctgcaggagtcctcccagctgcccggccgctactcgctcctcgccagccgcttcgagccgcatctcgctcacctctgttcgcataagctcgcgagcgcggccgtcctgcgcatcattaaccagcacgagagcctcgagggtaagtcggcccttgtcgactgcattgtgtcttcctcgctttgctgacgagctcacaccgacctgccagccacgacccgcatcctccgcggcctctttctctcaccgaacgacgaggttctgaacgaggtcctccgggaccgtgagtgttggcgcgccctctcttcagcctcagctagcggctgacccttcctcctcgcctgcagaaattcacggcgtgtcggtcgtccagaagattctcgctcttgccgcgaccgaaaccgaccggccggcctacgtcgaagcggtgacgcgtgtcctgctcaagctcaacgtctcgacctcgcagacgtaccggcggatcctcgaggaggtcggcctgccgtttatcccgcccccgccgccggccgtgacgtcgtacggggccaacgcggcgtacaacaacagccgccagcagccgttctcgtcttcggcgtccttgatcccgccgcaggtgccgtacgcgccatacggtgtcggcgtgcccatgtacgactcgtcgtcgctcatgatgggtatgaacacgatcgcggccggcacctcggacggctggatcggcgcggcgtcgtcgccgatggcttcgcacctccagccgctcctcgtcggcggagctcacatggaccacttccggaccagcacgctctcgccgaccttttcgccgacgagcgacccgttcaacccgtttgcaagcccgccgccgagacaggagcgcgggctccctggcggcggcggtggcggcaacggcggcggaggaggcaacggcttccggcggtcgagcggccgcgcagaccggagtacgagcggccggtcgacgcctcagcagcgtcagcagcagcaatatcagcagcagcaggcggccttccaggacggcggcgctgcctcgtacggagggccgacccaggctcaggtcgactggcagcgccggcagggccagcaggtgcgaccctctccaggcctcgtgtcgactcgttcgcccgcctgaccgtcctgtggcccttttgcagttcccgatcaacccttgagctggtctcatggcggcctttgagacggaccctctgcacgaccctcgctgagccgttgagacgcctctttcgccaagcgatcctccctggatcatctctctcaagcgtcccaccctcacccaccatcctcgcactttccatcattgagcggccaccacggactctctctcactctccacccatcttgcacatccgaccgcttgcttgcacatccgactcctgctgccgcacgcctgccagacgccgaccgggcgttcaacggcgcttcttcttccacgtctgctttgcttgcgcccaaacctgcttctctcgctttctttcaaatgtatcgctcgctacctgtggtcgaccgtaccctggctcgtgctgtgcgagtttgagactccgggcgccatctctcgcgcgcgcgcgggcggtcgaccggctgcggcgcctcctctgccagagagagccatagagcgaccaccccgacccacacctggcagcaacgactcttctctttcactttcgtgcgtcccttcccaccttgccaagctgctcgcatcggagctcgtcggcgcggcccgctacgccgaccggcgcgactctgcgcgggacagcccgtcggcgccggctctgttgttgggcgagattgagcggggagagggtccctccgacccgatcaaaggagggccggccgggtgcccttctcaatctctcgtcgcccggtcgtctctgaccgacgtagggtctgggcatgcgcctgtcctgccctctggctgtgctgcctgtcaacggcggacgaggaggatggaggccaaggggaaactctatcgccccgaggcgcatgcttcgccgtcctcgcttgtctcagcccgccgcccttctcaagagcaagcagggatggctgacctctgccctgacccgtcgcttgtctagcagaacctcctcgtcgccttctctcgctcaattatgcagaccatcaaatgcgtgcgtcccccttctcgagccggttcctcccggctgccgagccccccctctctcttccgaagctcgtccgcacagaccgctgacgcctctcctcatccttgctctttgattcaacaggtcgtggtacgttggatcttgacagcagagggcggatgggccgaccgctgagagaccgagctgatctccttctcgtcgacgtaggttggtgacggagccgtcggaaaggtgcgttcgggacccccgtcacgggcccgcttcggcgcgcctgcgccgagcaaagagcagcatctgacccgccgatacctccccccctttcttcctgcgcgtcatcagacctgcctgctcatatcgtacacgaccaacgtacgttcttgtggctttcgcattactggtgctgctcgaggcgaccagccgcatccagaggctgaccgcaaaaccctctccccccttcgccctctacagaaagtacgccctgtcgtctgcagtctcgcgtggctctctggccggtattgacgacccgctctcgtatttgctgatgctcactcctgtctgcagttcccgagcgagtgagtgccggcgtcttcctccttgtaggtctagcttccgcctctgaccgacccctctccctcatccgcaggtatgtgcccacggtcttcgacaactgtgagtgcccgtcaccagcctacctgtcacacccgctcgatattcaggacgctgacccggctttcttgcacttgctcctgtagatgctgtcaccgtcatgatcggcgaggacccctacacactcggcctctttgacacggccggtcagtctcggcggcgtgtgctcgcccaatccaaccgactgacatcatccgctgtttgcccgcccgcgtcttgcaggccaggaggactacgaccgtctgcgcccgctctcgtacccgcaaactgacgtcttcctcgtctgcttctcggtcacctcgcccgcctcgtttgagaatgttaaggagaagtggttcccagaggtccaccaccactgcccgggcgtgccctgcctgattgttggcacccaggtcgacctgagagaggacggcgccgtctgcgagaagctcgcgcgccagaagcagcggccggtccagcacgacgccggcgagcggctcgcccgcgagctcggcgccgtcaagtacgttgagtgctcggctctgacgcagaaaggcctcaagaatgtctttgacgaggccatcgtcgccgcccttgagccgcccgtggtcaagaagaagtacgtcggcccgtcgcttggccttgctcttcgctcttcgtcctggcactgaccttgatttgcccttcgctatttgcgcttctcaggaagggctgcaccatcctctaagcgccgccgccgtctctctcggatcttcgcacgcatacgccctctccccccctcgcctttcttctcccctccgtccgcgctctcccggtcccccgtgctacttcttttccttcactacaccgcctcttttctcgcctcgcctcgctttcacgaccaagacatggccctcccctcgaatctcgagggcgcaggacaacgagggagggtcgagcagagcggcgcttcgcctctcgcctccagtagaacccttgtgtcgaaggtctccctttcgcgctcgctttccgttcgcagccctctcaaaccaaccttctcctcccgttccacacgcgagctctttgcatctattcccccccccccctccgtgtacactttctgcgctggccaggatcgggagcgagcagcaagacgtgccggattacagtgcgcccgtcgcctctacgacggttgagagggagcagtgcaaccagtcccttcgatcctctttcgaagtcgagcgagcgggcccaccgcttaaatgtcgggccattgcggggtctccgggtcgggtcttagagggatcaaaggggctcgtcccttgttgtccgctcgacgcggcccttttgttcgtcctgcgtcccacttaacaccgtttgcgggccgtctagttcggctaaagagaggcgagagagggctgaccagagcaacagtagggctcgccgcttacctcccgaccgtcaacccccttccctcctcaccgcgccacccttgctccgcccaggccatgcctcctcatgcctcgccctcctcgtaccccggcacgtctttccttcgccggcagaaggcctgcgcactctcatgcctcgctacgacgcccgtcgggacctgcaccgacgccgcttgctcgtgcgcgtcggcgagctggggtccggccgtgctcgtatgttctttgcctcctctcgcgcggcatcgtgctctgcatgctcttgctgaccgtctcgacatacctctccgcagtcgtgccttcaaagctcgtgcgagtctcaagccggcttcaacaacgcctacggccagctgattcagtactgcgaagctgcggtacgtccgcccacgcaatcgcacgactccagccagccgctgactgcagcgctctctctccaacaggacttgcccttcactctgcccgaaccgtccttcactggctctgccggagctccaccaactgcctctgcgagccaaaccgcacacggtcctgcggcatccccgagcgggcgcgcggcaggaagcggctcaaagcccgttgacgtctcagcgattgtgcgtaccggtctctgtcgggcggttggtcgatcagcactgacctgatgccttacgccttgggcttttgcagatggcctcgctctgttcgctgctctttgccatcgccctcgtcgttggctacttcggcatccgcgacaagctccgccgcgcccgaacgcacgcaacctcgacaaagccgactcagtggtccggcggccgggcggtcgcttcgactcggacggccgacataaggcggtcggcggcggcggcgcagaaggacggcaacgaggcgggccggaggtcgagcgtctatggcgccaatacgtcacagttcgacacggcaggctatgccgacctcgagctcgaggatcgccggctgcagggtacgtccgccgcacgtgttgccgttgcgatctcgaatgctgacccactggcctggatgctgtccctgtagctcggctcgagcgtgagaaggcggccgacttgattcgacagaaggtcttcgacggcttcttcagcgtcccggccgtcccgcaagagccctcgacggacggcaagtcgcacgcctcctccttctcatcgaaggcggcacacgaccacaagaacgtcgtcggctcagacgaggacgaggacgaggacgacgacgacgagggccagtacgtcaccctcccgacgctcgggatgggcctcggcgccggcgggagcttctatgcgatcggctcggcgagcacgtttgacccttcgtcgccagggacgagccgctcggctggaagcggcggcggcggcgagggctggtcgcagcaggcggcgggcgagcacggcgaacagtgatagaggaccgcggcatctaagatacgattaagatatagagtggtccctcctcgtccaggcgtgttttcctagcctcacggcgcctcgtcctcctcgccgccctccctcggcatccacagggcgcacttgccgctgccgttcccgccaatgacgtgattgacgatcgacgggtgggcgaccgtcacggccggtacagcggtgatgctgcgagcacacagcaagtcgatagtcagcacgcgggcagcgtacaggaggccatgaaaggtgcggacggacaactctgggtcgaacaggtgggcaatgggttcgcccgaagcggcaaagacgtcgagcgagcggcgcatgctgccaacggtaaagaagccgccgtgctcggtgtactctacggtgcatcgcgagactggtcgtcagcaggcgcaggaagcaggtggaacggcgacgagggacgcacggctccactgggcgcgcaagatcgagagccaccggccggtctggcagtcgtgcgggacgacaaccgccgggtcgctaaactcggtcgccgtgagcggccgccgctgctcaagggctgacctgctgatgtcccacactggaggaagttctcgatcagtcaaggtcggagcaagcgagcagagcagaacgactcagcgcgcacctcgcagatggtcatcgtagctcgtcgtcaggacccggccgccccacgggtcccagtacgcgctcgagcagctcttaccatgcttccagacgccgcgaagcaggcccttgccagacttgctcgcggcatgctcaacgacgtcgtccgacgagacggaaccgagcgggaacgtccgcggcgtcgaatcgtcgttgccgacggacgtgagaaccgtgtcggccggccttggcatcgcatgcagttgtcgtgcgtcccaaatcctagaggtgtgagtagttccaattagcggtcgcctcttgacaagtcgcatacgccacacgggacgcacctgacattgcgatcattgccggcggtcacgaggaggttcggcattgtggcttgagagagcaaagggtgatgagcatagatgcgagaagctgtcgcgaacgaaagccggagactcacggttgatgctgaccgcgccgagcttgttgccctcgccggcctcccagcgccgagccttccccgccggccgttcgcgcagatcggcatggcttagcccgccgtgcttgtcggtcacccagagctcgtggccgctcggcgtcagatcaaagctcgtcagtaggcagtcggtatcgttggcggcaaagacctcggccgaggcttgggtcgcgaggtcgagttgacggacggtgcaatcgtatgagctggtcagaagctgagaacacagaaaggagtcagtcgtccgcatagttttagaacgcaaccggtcggccgcaccttcttgttatcagagggcgagaccctgatgcagctgatgctcgacctcccgtgcgcctgcaagctccagtgctttccctcgacgtcgtcgccatcctcatcgtccgcctcgccatcgtcgccggcatgctcatcggccggcgcaagagcgtcccagatgccgagcgagcccgtcttgtcgccgacaaagacgagcgtcttggctggatctgggtggaccgtcatcgagaagacgcggtcggccgtcaccttggcgaaccggccgatgtggcactgcttgaaggcctgcctgagatcggcgacaccctttgcagccgctttcgtgtcggagccgctgagcccggccggcgcgtctggccgatcagtgtgcgctgcgccggcgagcgtcgacgagagccgctcgaggtcggcctcggggatcggctcgggtaggttgtcaagcgagtagggcccgtgcgtcgcccgccgcttggcctcgcgcattgccgcccgctccttgtcgtcttcctcctccttgatgcggagcacctccgagtcggcctgcacgccctggagtcgggccgacgcccgcctaggcgcaatctcggacggcgtcgggcgaggcttcttctcgcgcttgacgggtgcggccggtgccgatcgcttggccgggacgccgagggcagccgacgagccggcctcgatgccgagcgacttgaggagagcctcgttggcggcgatgttggccaggcgctggcgctcgctgcgagagagggaagggagtggcgcgtcgcgcgaggcgagggagggcgggcaagcgggttgaatcagtcttcgacacctggagagagcccagccagtaggaccgactagtcgttgttctcgtcgtcgtccgacattgcactctatctggccgtcgtcgtcgactgaggtcgctgtcgttgctactggtctcgcctggcgttcgtcgcgtcgtcgaatcgatgcctggcggggctggccgaccttaaatgagtaaccgctcgaacgtaacttgtcgtcacacgccgccccgccgcgtagttgaccgcctcgctgccctggacctcaaccagccactcgctcctcctcctctctcccgacagaccgacagcgaccaccctcaagcctgccaacgatgccgccgcgccgcaatggagtcatgggcccggccagtgcccttacctcgttcctcagagtgcgtctctttgctcggcggcttgcgggccgaccggacaatgtggcgaatccgccctgactcctccttcctctctctctcctgactctttcgctcgtcaggaccaaggcatcaccgcccggcacggcacaggttatcagcccaacgcgccgcctcaggccatcgccgagggtaacgagcccgccgttgccgcagccaacgccgaggccggtcctggcccgagctcggccgccgctgcctcgtcgagtacgggccctacccggcgaagcgcgaacttcgacccggagcagcttcgggcgcttgccgagagcgacgacgaggaagagatggtcgtccggtccaagaagcgcaaggtcgtccaggtgaggctgtcttcggtcgaggcgtcgctccttgcgcacgcagcgcactgacctgctcgtctcctgcccccctgttcgtcttgttcttgccagaacgactcatctgacatcgacaactctgatgccgagtcatcgctgacgactgcgcagaagaagaagaagacacttgagaagctcgctgccaagaagcgggcagcggcgacggcggccaagaccaagcttgcgtacgccgacgactcggacgacgactcggacgacctcgacggcacggcggcgacggcccggcgcaagaaggcggcgctcgcggcggtcatgaagggctcgtcgtcgggagcgcctcagattggtagccggatgacctgcggcgaatgccacaagcaatttacctacgtgcgtccttctcggtcaaagggaggcccgtgcgctgctgcgcgccacccccgcgccgttgctgaccggtatcgttccttctcagtcaaagtattcgccgcccgcgcccgataacgagggttacttcctctgccacgtttgctccaaggccgccggtttcggcgactacaagggcccgcaggcggcgccaaagaagaaggtcgagcggcggcaggtgcgtcgtctccgtcacggcgcatgattatcggctgacgtactcttcctgctcggccgcctcgctcagattgtccactatgaggccaagaaccgggtgccggccctgaccgacgtttgcatctcgatcgtcgcccggcacgtcgaggacgtcgagagcctcggcgacattggtctcgagaacatgcgccgagtcaacaacatcatctgcaagaaccgcaagatgtgcgtcgacacgcgctcattgcgttgctggccgcttcgcgctgacattccttgacgtcttgcttgacgtcttgttttgacaggacgcagcacactgcgactcttttctacgacgcgagcgtcaccgacctgactatgaaggactgcacgcgtgcgtcgtcgtcgccttaccaccctcgattctgaccccccgctgaccctttgatccgcttctgcgagcagtcatcgacgccaacggctttgcgaccctcgccggcctctgcccgtcgctccggacgctccatctctcactctgcggccagatgcagtcgtcatcgctcctcgcactcgctaagctgcagcagctccgtcggctcgagctctacgcacccttcctcgtccgtaaggaggcctgggccgagttttttgagcggatgggcaagcgcgagggcggcgggctcgagggcctcctgatccgcaactcgccgcgcttggacgaggccgcgctcgaggcgctcgtcgaattcaaccctggcctcaaggagctccggcttagcctggtcgagcagtgtaagttcgttgcttcggctcctttgcacagacgagtcgctgatccccctgcttttcgcagttgccgagtcgtggctcgacaagatcgcccggctccggaagctgacactgctcgacatctcgtacccggccaagtcgctcgacggcgcgacggccgttggtggcgcaccgcagccaggcggcgctgcgcaggccgatgtaggcctcatggcgaccgcgaccgacggggccgtcgctgcgccggtcgacggctcggccgagcagctcgcgcaggagcagcgccaggcggcggtcgaccactcggcccacagcatcgtcaacctcctgtcgtcgctcgggcgcaacctgacgcacctctcgctcgcgggacactcgttcctgacggccgacattcttgccgaggccatcggcaagcactgcccaaaggtgacgcacctcgacctgtcggacctcccgcttctgaccgacgacggcacggcgacctttatcgccgcctgggctcctgtcgggctcgtcgacgtccgctttaaggcgtgccacgccctcggctcggcgacgctcgaggcgctgctcgcgctcaagggcgagctccagatgctcgacatcgccggctggaaggactgcgaagaagaggtcctccggtcgattggcaccaagaagggcgccagcctgcgcgagctcgacctcagctggtgccgtgcgtcctgctactctcttgggcctcgctgttcgcgtcgctgactcgatgttttgtcatacaggcaacgccactgactttacgctcaaggagattgtcgaccacgcaccgctgctcgacaacctggccgtctggggctgcattctggttacgcgcaaccactcgcgccgcaagaacctcaaggtgcgcctccgagctgttttgctacttcggcaggcaacctcaagctttacgccgctcttcagcggagcaggggcggcagacgatgcttgtcttggccgcttatctgttacgacgcacgagcgtctctgccccgcaaaggactcggcagccggcagccggggtctcccgtccgctggtacgaccgatgagctgacccgcccttccatttgaccttcgctcttcgccgccttctcgcgcgcttcggcagattatcggcgtcgagtctcacgagtttgggagcgctctccttgcttgaggaggagggaggcggacggccgtctgagcgggttgccgtgcgcgcgcgacggggtcgacgaaggcgagctacgggcacgggcggtcagcagggcaggccctgtgcgcgtatccgcaagaatgtaaggaaggaaggggggtgtcacgcgccgcccagttcaaacgtaacatgcaccatcgccgcgttctcgcccagcaggtgcgaaacgagtttggctcgtgcgaggatcgtccgttgcggaaacactgtcccggatcgcttgccagttcgcgggcttctggcagccgtccgctggctcgctcttgcccttctgccgaaggagcagctctcacttagctctcagcagaggacggaagctggtgctcgagctgtggccatgggtctctacctgctgtgccggctgacatgagcacaaagagggaggttcaagccgatgcgctggccggctttggttcttgggggctgaaagcgcagtctgctggcctgggcctcgcgcgcggagtcgtcgctggcgccgccgccgcccgcggccggtcgaagggacgaaccgacccgacctcctcccgtcgacgacaccttccttcagacgaacagctacgaccgcctcaagtttcgctagtcattctcctccctctccttctctcatcaagcctcgcctcgctctcgcttttcgacgtttccgctccgttccgcccgcccgcaagctctcggtcgacggttgtgcccgcctcgctcccacacccgacaacccctcctccttcccctgcccttctccggcccgccgcgggtccagctagccaagacgtcgtcccggacgagtaccctcaagagcatgccgaccaaccgacgccggctggccgtcggcaactgcgtgcgttcctccctcgcttcctttgtccgcccgctcgctcgaacgccttggagccggccgcgcgcgcggcgtccgccgccgcgccgcccagcacagggcaccgcgaggtcgctcccctgtcttgcgtccgtcgcgccggctcggcgtcagcgtcgttgacaggcctcgtcgcacagcatggacggctgaccattccctctactgcttccatccagagtcattgctcctgcgacgaggtacgtcgcgcgccgctcctgtgaccgaccccgtcggcaacactgcccgactggggaaacgtggccggccgagcagccggcggaaatcaactcagcgcggccgtgctgacccacctcgccatcctctcttgctcgctctttcatccttgtcctgtcgcgctatctccgcgcattgccgctcgcagacgatgaccagtctctggcggacgggcctcaacaaggagcggctctggtgcgtctgcgcgcgccgcgcccgcgcccccgcgggtcctccgctccgtgccttgtgactgacggctgttgacccggccgtcctccctttctgttcctctctctcgcgcaatcggccttcttcatgtgctcgcgctctcttagtaatgcttgcggcctctacgtccagacgcacggcaggatgcggccgctcgctgcgctcggcgcccgcaagaaggccgaagcccaggcggctaaggcaaagagcgagcgcgctgcgcttccggacggcggcgtgcgtccctattgttgcccgctgcttgcttgctgcggccctccctgttccttgatggtcacccgggactgacgtcctttgtcgtccgcccattcggcaggccgtcaaggaccccgcccgcgctagcaaagccgaccggccgcgcccgacgccaggcccatcgtccgtctcgtcctcggtcagctcgcttccgggcggtggtgtcgcttcggcaggcatcgtcccggccaacgcccagccgcgcggtcggtcgcactcgatctcgacgacgaccgagtcgtcgctgccctcgccgcccaactcgacggccgacctgccctcgccgccggcccggctgccgaccgagtcgccgccaccgatgacgctcatgtcggcctcgctcggccggctcgacggcgccgccatggccagggcaggtctctcggccgacgccgactttgcctcggctagcgctgccgcccgggcaaagaagggccagaagcggcattcgatctcgggcggctcgtccggcgggttcccgcatctcgctggcaacccgatcgtgctcaaggcgccgacggccaagaagaaggcccgctttgagcaggccggccagccgcaattcagtcggccggcgggccacccgtcctactcgctttcggacctgcctcggccattgacggcgctgagcgcctctgtacccgtctcgtcgcccatctcgatctgcccgccaagcggcggtgtcgcagcggcagcaaccggcgacggcctgccatgctcgcgctgcgccgagctcctgccaaagcggtcggctacggtgccgatgtcggaggatccagtctgcgaacgctgcgccgacgcgcccagccaccaccaccacctcagcagccgtcaccctacctccggcggggctcagccgccccggcggcacgcccatcagcgggccttctcgtcgtcgtcggtcccggtccggtcgtcgatggctgccttcagcagcaccttctctggcgggctgacgccgctcgaggcttgggactccggcgacgaagactacgagattgtcacgcggccgtcatcgccggttcagccgcagccgcgcaagctccaggccggctggtcgctcgaagaggagttctcgttcctcgacacggtcgactcggacgacgacgcggcgccgccggctcagccgacgctcgccggctggggcggacccttcttccgcaacatgccgatgccgccgcccaagctgccgaacgccgtcgcccagcacacggccgctgctgcgagcgctcaggctgcggctgccgctgctgccgccgccgccgcggcttacccgtcgccggtctcgagcttcctcggctaccagaatggccaccaccagcgctcgtcgacgtcctcgccctcgtcggcctcgtcccagtcgccgttcccgtccaacctgccgacgccaggcggcgacggccaccatggcccggccgggctccacctcctcggcgctggcggcagccacgactatcctggaccgaactcgcccatcaccgacgcgagcaacagcctgcactcgctctcgcagcggcgcgggctcggctcggccaagcttcactttggcaattcgccggctgctcagggtttcctcccagccggcactgtcccttcctcaagccggatgggcaagcccccaccgccaatcacgaccctcttctcgcacccgaccggcggcgacctcgagttcctcgtccgggccggcccgcccagcccgattgtcttcggctccaccgccatgcgccggacccatagcggcacgggcgcgagcgtcctcggcctcggcgggacctcgcttcaccaccagtcgcatcaccacggcggtctcgacgatcaccatatgaccggccacgacgtcctcatgagcgacgaggttgagatggaggacctcgagtaattgtctcggctcttttctctcacgaaggccggcgcccgctctgggcatctctgccttcgacccttcttcccgtcttctctgcctctttgtcccgggaatacctcgctgcacacacgtctcacactgccctgccctgcccccacttcgtaagtcgcttgcggcctgccagcctttgtggctcgtgcgctgaccaccctccgctcctccctatgcagacgtcaacgacgccttcgaccgccctgtcatcagcggaccggccggaagcgaaccaaatgaacgaaaaggcacgctccgcctccctctctgcctgtccatttctccacaccccgagaagacgcgcgcccgccccgccagcattggcttcggcgcaaaggcgttcgcaccccccaaaaaaagcctctgtcctcgttgtactcctgcctctcccgctcgcgcggacgctctcgtccaaggagtcctccggtctcgctctatcggtgccgccagactcctcgctgtcttcctcttcgtcaacaaccccgtgcgtcgccgtacataagacctcgcgcccgacccttgccggcgaggtctgccgacttgaacccttctcccctctgtaccccaacccttcgcacacgcgcgcgcgtcttgttgccctctagtcacccggctcttctaccaaagaccgtctcctattcacgcaaaatgcagccctcttgtccttccgtagagctgagcgtcgccggctgagcgcttgctctcgacgcgaaagaggtgccccgcacccgcggccgacgtcagcccaaggcgaaacggcccgttgcaccggagtcgcagtgctcgcagtcgccgccgcctcctcctcctccttctccatcacacttcactcccatacacctgcctcaacatgtgcgtgcaatgctcgctcttgcctacgtttgatgagccggctgacaccattcgctctgcgccagggcaccgatcgacacgttcaaaaaggccggcgatgacggcgacttcgtcccgggcatccaaggtgacctcttgttcagccctcgcttcttgcgaccgtacgccgccctccgacagcgctgactctgatggcgacttgatagactatgcaatgatcggctcgctccggacggcggccatggtctcgttgacgggcagcatcgactcgttctgcatgccggtcggtccatcgtctctgtcggaagctgctatgaccgagttccgagctgacctggcgttttgcctctggaccctgcctcccctcctacagtactttgactcgccaaggtgcgtctagatgtagacgggcgctttctgattgtgctgctagagctgacatctcctctgcaacctcccgctgcgcaggtaagagcgagctcgtcccagtcagccggctcgcccggagttcgcgcagggctgacgtcgcccgaccatgtgtccaccccgtctggaccatctcgtcctccgctagcatcttcgcccgcctcgtcgacaaggacaaggtgcgctccttttcgtgttcggccgccttgcagccttgaaatcattccgctgacgacgcgcgcggcttcccgatcgcgacgctccagggcggccactttcagatcaagccgacctcgcagttcacgacgaagcaggcctacttgccgtctaggtgcgaagattcttcccatgcgtaagagaaagcggttcgtagactgacgcagcatgacgagtctgcagcaatgtcctggcgaccaaggtgagcagcccggctcccgtgctcgctgctctaccaagcgtagcgctgacggggtctccgcttcccagttcctgtcggaggagggcgtcggctctgtgacggacctgctcgtgcccaagtcgtcgaccaagcccggcaagacgtacctgccctggctcgtccgccgggtcgaggtcgtcaggggcaagctcaacttccgcgtcgagtgcatgcctggcttcaactactgccgcgacgagcacacgaccgaggtgcgcttcgtccattcgtgctttccgcatactgctcgactgacctgtaggcctaccccgcagttcgttcgcgatgactcgcaggtggcgtcaaaggagtttggcaagcagaaggtgctctttacgagccccgacatcaacattgacgtccgcgtcgtcacctcgggcgaggatctttatgccgtcaccggcgaggacgacgtccggagcgaggcctgcgagaagaagatgaccggcgacaatgaggtgacgaccggctcgggcccgatcatcgactggaaggagctcgacctgacgggccagggccacctgagcaccggcgcgtacgccgagtttgaggtgagtctccgttctcggcgcaaaccagtcgttcgttcgatggctgacgctcaacggccccctctgcagctgcgcgagggtgaggtcgtcgactttatcctgcgccaggtgcccaaggacggcttcaagcggtcggctgccaaccgggcgaccgaggcaaccaaagagatggccgagcagctcggcgtcgacctctcgacgctcgccaagggcgtctccaagatccgatcggacgaggacccgatcctgagcgccaagctcgtcgagtcgctcatcgagcagaccaacacgtactggctcaagtggatttcgaaatgcacgtgcgtcacgacaacttgttgtctcttcagcgtgcgcgtcacgacagcttgtcgtccggacctgacgcgctcctttcttagttacaagggccgctggcgcgaggccgtccaccggcaggcgctcacgctcaagatgctcgtctacgaggagacgggcgccatcatcgccgccccaaccttctcgctccccgagcacattggcggcacccgcaactgggactaccggtttacttggatccgcgactcttcgttcacgctctatgcgctgatccggttgggctacacggccgaggccaacgcgttcatggagttcatccagcagcggctgtttgagcgcaactcggacggctcgctccagatcatgtacaccatccatggcggcaaggaggcgcccgaggaggagctcacccacctcgccggccacaaggactcgaagccggtccggatcggcaacggtgccgtcgaccatctccagctcgacatctacggcgagctcatggactcgatctacctggctcagagtacgtcttgccgctcaaccatctcgagccctgctcctgacgcttcacctttctccccagagttcagcaagccgttgagctgggacatgtgggtggccgtccgggaagagcgtatcctcccctcgctcattggcgccttaacccgccacctactgacctccaccaccctccttcttgcagatggtcgactacgtctgcgccaactggaaccagcccgacctctcgatctgggaggtccgcaaccagcagaaggtgctgcctcccgctctgaaattctgtctctccacgagctaatccagatctcctcctcgccgccagcacttcctgtactcgaagatcatgctctgggtcgccgtcgaccgcggcctgcgcctcgccgacaagcggtcgctcccgctcaagcagcgcgacaaggtgcccgccggtctcggccgcctaacccccgtcaacgcgcagctgacccgacctcactgtccctcttgtagtggctcgcgacgcgcgacgaaatctacgaggaagtcatgaccaaaggctggaataaggaggagaagttctttgcccaggcttacgagagcctcgacgtcctcgactcggccgtcctcatcatgccgctgacgttcttcatgagcgccgccgacccccgcttccggagcacgctcgaccggatcctccgaacgccagagaagggcggcctgactaccaacaacctcgtcttccggtacgacacgtcaaaggtcgaggacggcgtcggtggagccgagggcgcctttacgctctgcacgctctgggccgtcgaggcggtcgcgcgtgccggtgcctacgacccgtcccttctccccaaggcgaccgccatgtttgagggtgagtcggacttcaaaagtctacagagagggccgctgctgacccgccatctcgctctccacctgcgcagacctcctcggctacggtgcgtgccaatctaaggaacctctcctgctgcgagtcgtcgctgaatttctccttctcttcccgacctcggtaggcaaccatgtcggcctcttctctgaagagatctcgcgtggcggcgagggtctcggcaacacgccccagggcttctcagccgtcaccctcatctcgacggcgtgcgtcccgtgtcttgcgcgtctgcttatgtgcgccactgctaacgtcgtcgccatcataccagatacaatctcgaccgcacgctctctggcggccacttctgatcaacccgctcgctgccttgtaccactatcgcggtgccgaaagcctgctccgctaactttgtgcacatctgctgctgtaccgatgcctctgtcacctgctgtgttcgtcctctctatttgacgtggtagtaggcttgctcggccgtgcgctgcgagctcgcaagccggagacggggcggcgcgcagcgcagcggccgccgccttgacctcgcctgacgcgcctgcccttccttccctcctgaccacgacctcgccttctgcctctcgcctgcccttcgcttgtcagcatcttgacgctcgcccttgtcactcgtcatcagcatgcgccgctcgcttcgtgtcgtgcgcgccgtctgctctcgcccatttgaggtagccggccggcagctaggcgggcattcggcccccttctggctcatctcgtcagcagcacgcccgtcagcagccgtagctaccgctcgagatccagctgctagtgattcgggaggccgcctcgaacctcataggccggcggccgccggtgtggaagtcgacgcttccgaccctcagcctcgtctctccggcctggcgagtgcgtcccctgtcctgccgtccggacgtgtcagcgccgactttctccttccctctcgtgcagaaagaggctagagtctgatgtttgcacgctacgacaccagttggagctggctgacgggtatggttccggacctcgctcggcatctccgccagctcgacttttgggactgggacgcctaccgcttcctccgctcgcggcacatcttccccaatatcgtcgagctctcggtattcgacttcaccgggcactttccggcctctgacatcccttcctcgcccttgcgcttgtctaagcttggcatctccttggtcacggtcgagcccggtcctggacacatcgccgtcccgctttcttcggttgtcaacccgcagactctccggtcgctgaaggtcttcaacatcagactcgacaacatcgctttgctgtcagattacctcgggtccttcttcaacctccagtcgctcgagctcgagggctacggcgacgattcaattgcccttccagccgacgcccttttctccctcatccacttgtgcgagctcgctctctgcgaaagagactggaactcggtcctctagcaatcgctgccggccctcgaaacgctcaagattctgttcgacgacagcctgctgacatttgagacgctcacgtcagccgcgatccgggcgcgcttgccgtctctgacgactgtccggaccctccacgctgccttctcagacccggatgaaaagccgccccgctcgatagtcgtccggtttaacggcttggctcgacgcctgcgaggcgcgaacatccgcttcctcgactgcaaaggccaggtctggcaggagagctgggatgccctccctaaggactcatcttgtgcgacctgttgcggtgccgtcccaatctcccttccggactggcgccgacgcgtggtcgacccatcgtcacattccgtcaatccccccttaggacgtctgacatcctccctctcgcctcctcgttcgtcggagcgggtcaagtcgcgtcccggccggctctcctgtgccgtccgctcgacgacgggtgcctcctcggccgcagcaaacgcccgacccgtccatatgagattatcatgctcgtcacatgtttctctgcatctccaacaactattgagtctgcgtgaggtttctggacgaagtgcaggctgttgacgtgcgttggtcagagtgtgcgcgggggtcgtgcgagtgcgcctgcggcacttgagcaccggtcgcttagtgtgaatcgggcgtgcgagcagaggaggtctgaaggggcgacggcggcagtgccctctctcgtgcgcgagcagacggcgatgtgacgtgtatattagatagagagcagcagagcgaggctctagtatgggccggtgcgccagtcgagcgggttgtcgccctctgtggcggctttgttaaagtcggccgtcggcgcccgccgcctgctggccgtcgtgccgttgctgacaatgcgcgaggtgcggctgttggcgcgctcgacctcgcggtgctcctcctcgttgtcggacgagtctgggtcgtcgtcgtgcatgcgctcgttgaggtcgtacgggagcggcagctcgcctgcagacggcgggagagagagatcatcagcaaatggcggcgtatgcagagaggtctcgctcaggacgaacgagtcacgcggtactggtcgacgtttccgaccatctcgttctcgactcggactgaatggggcaaaggtcagcgcggattcaacagcaaggcgcaacgcaggcgacgcacagaaattccattggaagcgccggagcatctcgagcgagtagaagactggagaagagacgcgcgaggatcagtcgccgggcccgagacgcaaggccctttacgatgaacacgcactgaacgtgcgaaggcgaatgttgcgcccggtcgccgcgtcgatgaagccgacccagacgaagcggatggcgacgttggtgacgatggcgaaccagtaggcgtacgacttgccgcggtagatcttctcggttcgcaggaagcgagccttggggctggaaaggcagagcaggatgggtcagcaagtgaaacgcgactcagcgacgggcggagggacgcactccatgacactccagtcgatcaggaggtcccacgcgctcgtgtagacgctcgtaatggtcgcaaagacaatccaaggcgcgaacgagctgtctcgctgcgaggcgcctgatgccgagggggaggacgggcggtcagcggacttctggccgagcgacctgcacaaaagggagctgacctcgaccgcgccagatgtagaagcaagcgaaagtgacgatcgtggccagatacttgccggcctgtatgttggagcgcttggaggtcagcgagaaggtcgcagcgacctggagcgtaagtaacgcacgttgatgagctggatgccgacgcgcgactcgcgataacgctgaaggcactggaggagtcgcgcgagcggcggagcgaccgatatgacgatgacgacccagctgtcgtagttgttgcacgtcttgaaagggtcctttggccagccgttcgcttgggcgcagccgataaacctgcgagagtgtctgtgtcaatttctgctgcttgacgcgcaatatactaggctggattcgactaaccaaatgtggaagagggagaagatgagagagttgagttcgtctgtaagtgagttgaaaccgaagcggttagcggccgagcgcatgcatggctttgaagagacagcaccgacctgcaagctgtcgaaagacaaggcggagagtcagccaagattaaggaagcgagggaggccgattagaaggtgacgcacgaagaacgctgcaaactcgacacgactgtagcctggcgtcaagacgcggaagagggtcctgttaagcgagagcagcgaggtcgatcagcgagggcctcctctggcgccgagggagagacggaccggatgagccagaagcgtgccggccgatgcatgacgggcagagggttaatgaaaaggacggccgtcatgacgagccaggcgataggccagctgcaaagcggagaccattaggatcagccggacgtcacgcaagcagcagtcaaagggacggaggactcacgttgtgggcgcaacgttggacgccccgacccggttgaacgagaaccagaaagcgaacgagagggtaaagaagaggaaagcagggatctgggggcgagcaggaggggtcaacattggctctggcggagctgccagaccaggggctgacctccaggaatctggcggcacgaggggcaggtgtcagtcatctgctctctcgcccgtcaagcctcttgcaaagaggacgcactctctgtagtccatgacggtacgaatgtcgagctcctgcggtggtgggggcgtcgagtcagcaggacgcgcccgcatcgagaatcgctctttcgactgacgaagatgaagcgatagttgatgcgatagcgggcccagacttgcagattgagaaagaagaggagcgcaaagatgactggaaggaagaaggcgccgtagacctggagtaggccgtcccaagcggggatgtcgcgccgggcgtcggcatggaaggctgccagaaggaacgaggggatgagcaccagtcggacgctaggagtctcaggaagtacgcacaaaggacgagcgcgtggatggccgtcggcagtgcgaggccgatcaggatgccggagcggaagatgctgtagtggtggctgcgggtgctcgcctggacacggagtcgctcgcgagccgttttcttgttgccgtgctcgaagcgggcagcgtagagctcttcgagctcctcaatcaacctgtcaagctcgtatgcatcctgccgggcggaggagaggcgtcagtcgaggctcgcgcaatgtctcgagctgcacacaccgagaaccgctgcttgctgatccggtcgttgttgtaggcttccataaggtggatctgtgccgagcaaagacgccgtcagccagacgtgctttagcctacgtcgctctcgcttcagcctcaccttggtcgccttctcaaacttcttgagcgccttgcggaagcctgtcaagttcaagattcggtagttcttaaggacctcgaggcccttgtaggcctcagccgttgcagcgcgcagcttgcgcttgtagcgcttgtacgcctctgggttgtagtgagcgtcttgcggatccgacagcggcaggtcgggctcctctgaggcgacgtgcggcgccgcccgagacggggccttcttggtccccttgtactggagaatcggcttgagggacgtcaggtaggctgcggccgcttgtgggagggctgacgtgtctctggcgtgggtctcctgaagggaacagggaaggaagtgtgcgtcaggaaaaaggtccagaatgggctcggccgaacgacgcagagaacgcacgtgataaacccgtcggtgctcggcgagctctttgcactggagcttgagattatcaaccttgcgccgcatctcgtcctcgcgctcgcagtagaatctgcaagaaaagtggccgtcggtactggaccccagggcggagcagtcgcgggacgtacttctcgactttggcgagctcgacatcgagcgcctcgacaaatctgagctcggctggctggagcgagggcagaacctcttcgagatgcgccggagccttggtcgaattcttggctgaaggggggcgcaaggcggtcagacggggtgcaagatgcaacatcagctcgcagcaggacgtacacgaggccgcagggtccgacaggagcgcgaggacgccggtgcgaggtggtccgctgctcaaatcgccaaggatcggtgaagcgatcgagcccttgcgcgaccggcgcttccatggcgggttcaacagaccggcgtcagatggctcaagcttgggcgacggcaagagcgaccaaggggacgacggcggctttgcttgtggcgagtcttgcggccgaagcgggttcggcgacgatgagagacaaagcgaggggatgccggacgcaggggctgggtcgagccctggcctcggggtggctgaggctgcaggcgagggcggcaaaggtaccgaccccggcggcaggaagctcgaaggggtcagacgatggacgacaccaccgtccgaagtgtccaagcgaggggatgccgttgatgaggagatgcgctgctcgcgtccaagtgccgcgggcgacgacgacgcattggggccggacgcggcgccgtcatcgagccggacacgcctcttggttgagcttcccgcctccttgcggctcgagctgcccttgagagccgggccgagagctgggcttcgttcgaggctgccatagcccttgatctcctcggacggcggcgcgagctgggtcgtccggccgagggaggacgctgcagacgacgtgtggctgtcttcggtcgtgccgcgcacttcctcctcctcctcctgatcgttgagcggaggccgaggcgatcctcgcggagtcggcgcaccactgcggacgagtccgccgagacgctcgatggcctgctggtcctgatactgctgcttgggcgagtcgtgctcgtgtatgccaaagtcggactcttcttcgtcgtcggtcggaggcgcgcggccgtcgccgtcgacgctgccctcgtcgtcggacgagtcgtttggccgggcgaatcgcgactgctggcccttaacggccttaatgagcttcttgagcgccttgtagttgatgtaggcctgagagagggaggaagacgggtcagcctgctgaacagcacgttgggcgagccaagacgagttgatgcgcaggcaaagtggacgcacccgccgccactctggcgtcaacgtctcctcgagaaactgcccatacttcatcgccgcagggagagcgggtagggatcaggtgctggagctggttcgtctagcgttgagggtcgtgggtggaagggcaaggcgggtctcctgttcgcacagcgcgcacatgcttcgagccgcgaaaggggacgcctgcggggccaccaacaagtcggcccaaacctgcctctctttctcctcgttgaccaccatcagcatcatagccatggcctcgactggaacgacgacaccctcggccaagcgtgagcgctcggcgacaccgcccgccgccccaacgctggcggtggcctcctctgcggcggcttcgatcgacgagacgcccgacgtcaagaagctgcgggtcgacgacacgccggcagcctcgcctcctgctttagctgcggcgcccaacgtcgtcgagagctcggccgacgctcctgcggccacggacacctcgaccgaggctggcccgtcgacggcacggacgtactacaccggtcctgccgttccgcgcccggccgacccgaactcgaacaagtccaagaagcgagccaaggcggcgacggccggcgctcagggcggcaagggtcgcaaggtctaccaaggcaagggcagggagcgcaacgagcaggacgcggccgcgcgcgagtcgggcagcagctggggcccagtccgcgagggcggcgagaaggccgaccggctgcctaagaagaaaacggccgtcctgatcggcttcagcgggaccggcttcaacggcatgcagatgtgggttcctatgccagatcttcgggcttaccggtcgctgacctcgatcccatttgcagccagaagggccgggaggacatgcgaacgatcgagggggcgctcttcagtgcctttgtccaggccggcgccgtctcgaaggacaacgctgaggacccgaacaaggtgcgcctccggttggaagagagcagtcgggacgcatgttgacgcggacgacgccctcaggtctcgctctcgagggcggcccgcaccgacgccggcgtccacgcctcgggcaacgtcgtctcgctcaagctctcgaccgagctacccgacctcgttcccgaggaggagctgatcggtctctcggacgaggaccagcagaaggtcaaggcggccgccttcaccaagaagatcaactcgttcttgcccgagagcatcaggatgtggggctacatgcgcgtacagaacgccttcaacgcccggacgtgcgtcaactcccgagaccagcgacgaagagtgacatgctaagcgagctttacccggcagagcgtgcgactcgcgcatgtacgagtatctcctgccctcgcacgtccttctcccgccgcagccgacgacgacgatggcggcgatgctcgcccgtcaagctgagggctccgtcacgatccacccgttctggacggccgccgccgatgcctcgcccgagcagctcaaggagcagaagaaggcgtggcgtattgatggcgagacgctcgcaaggacacgcgacaccgcaaaggcgtacgagggcacgcagtgcgtcctccttgacctcggccgctcacactcgcgtcgcgtcagctgacccgccctcccgcctgcagcaacttccacaactttaccgtcgaccggcacttcaacgaccgggcctcgcaacgctacatcctctcgatggacgtccgcgaccccgttgtcgtcaacgggatcgagtgggtctcgttccgcttccatggtgcgtctcctgctcgacctttccgcgtgctgccgacggccctgacccggtctctttcttccgccctgcaggccagagcttcatgctgcatcagatccgcaagatgatgggcctgctcatcctcgtcgtccggagctcgacgccggcttcgctcctgcccgagtgctacggcccgcgcaagattcacgtccccaaggcgccttcgctcggcctcctgctcgaccggccgatctttggctcgtacaacgccaatgttcggaaggacgtcttctcggccgccaaggacccgatcgactttgacgccttcagcaccgaggtcgaggagttccgccggcgtgtcatttacgagaagctccgcgaggaggaggaggcagccgacgtctttgccggctggctcgccggcctcgacggccttgtcgggcccgactttgatttcctcaacccgcgcggcatcatcccgccccagtcggtccggctctcgccaaaggagcgtgcggcgctcgccgagcaggccggtgccgaggctgccgctcctgcgcaggaagtcggcgagagcgacgaggagctcgacggtgtcgacgctgcggtgttcaagaacgccgagatggagggctgagcggcctcgctgcgctcgatgcatgccactcgccagattccagacaagaagccatgtatcgcgcgtctcaccaggccttgcgcttgccgccttggccccagcgttcgcgcaggaaggtcgccatccactgatggagctcgaggagcgccccgccggtcgagaccctggcagcggatggtgtcattcgacgagcgcatgcacaacagcagcagcgagagccgacgcacctgtggttcgagtcgatgaaggcccgcgaggtgaagcgcctgaccttggccatcgtcagcttctcgaggagacttgcggcgttgacccagtggacgttgtcgtcggcggtaccatgggcgagaaggaagtcggcctgctggaagcccgtcatgttgttgatgcccgagacggcatagccgtccgagttggcctctggcgtgcgcatgtagcgttcggtgtagacggagtcgtagaagctgaagagcagggatagagtcagcacgagcgctcggcggcaagcaaggtgtgggagaaacgcaccgccagtcggtgaccggcgcgacggccatgccgagcgagatgacgccctcgctgccgggctggccgccgagctcgagcaccttgccagtcaagtagccgccgaacgaccagccccagattccgacccgcttgctgtcaacgtacgaccgcttgccggcccagagccgggccacctcgatttggtcgcgagcctccatctttccgagctggccacggatcgggttgcgaatcgtcttaccgcggaagccggtcccccggccgtcgacgacgagaatcacatagccgagctcggccgcgaggtgctcgttgaagccaagcccgaagcgcgtgtggacactttgcgaggtcgggccaccgtaaggcgcgagcaggagcgggtagcgcgtcttgcccgactcgtccatgttgggcggccggatttccttaacgttaagcacgacgtcgtcgaccgtcgccgtcgtccactggaccgtcggaaggaggtagtcggcaacaagcgcggcgagctcagcgttgtcctcgaggctcaggtcgacctcgcctgctatggtgggtgaggagtcaggtgaagtaccacagctgagtcgcgggtcggacggaccgtctgaaccaggtgcgcttcggacgcgttggctgggaactccgggaccgtcatagttctcgacccaatagccagcgccgggcgagaaacgggcgccaaagtaacccggcttgtcatttgacgtcaatgtctgggttgtagggacccagccagcaagggtctcccggttcgagccggcgatgggtggcagcgcggccgagtagacgtggcgctcggtcgagggagatgcagcgaggacgtagctgcgtggagaagcaccttggtcagctcagggcgaggtcggacgataggctgagcgacgcacgcggcgctgagctcctcatcgacggcaagcacgccgccgtccagctcccactcgcccgtcgtcagccagacgtgctcgtcgcttgccgctgaagggtagaaggcgaggtgccgccagccttgaggatcctcggccacctcgaggtagcctccggcgtacggcgtcgtcagctgggcctgcaaccggcgagggacgaggagcacggtcagccgcccgtacgagtgaagcaggtttggacagccgaaggacgcacatgctcgagccagccgtcgccgccactaagtgtgcggacgaccgtgccctcgagaacggccggcttgcctatggcggaagcaaagcgcccgctggcagcgacgtcaaagcgaacgacggtaccgtcggcggcggaccggtccgagctccgaacgagaaggtcgtttgggccgacccaagcgacctcaaagacaacttcgtcttcgggcttgagccggtcggcccagctgagctggcgaagcgaagccgatggagccgccttctcctgctgctgccggccaaagtggtcggcgagcgaaaagacaaacgcctcgaccgtcgggtttgcaaagccgggctttgggtaagcaatcgtctcaatcttcgggtaaggccgcgctccgccctcttgatccggatcgtagaccgggtaggtgaaggttgggacctgcgattcgttgaaggcgatgaaagcgaggtgcttgcccgaaggtgagaaccagagggcagacggaccgccaaagacctcttcctcgtagacccctgtagcggcactgaatcgttagcaccgctgctagttggaggcggccgaaggtccgccggcgacgcacagtctggcacgccgttgaagatgcccgccccggcgccgttactcgtcagtctcgcagcctgctcctcgaccggtcttccaaaccgaccagctcggtcgagcccagcagagtcgacgacaaacagatccttctcagcgtcgacccaggcgagcgcatggcccccgccatggccgatcgcgcttgtcggcgcccagccagcgaatcgcgtgccctgctgctgacggtcggcggtaaggagcgggatcgttttctggtcggcaaagcggaagacgtgggcggtcgagagggacgagtggcgccagatgggctgcttgtccgagaggacgagaaggtaggccatgtcgggcgagctgcgcaaaagggtgggcgatcaggctcggagatcaaagctagcacaagtcatgatggggacggacagtttccagtcggcccagtcaatgacggcaccggcctcgtcgacgatgtttgacgcattgacgagcaagcgccggtctggcccacccgcggccatcagcgccgagacattcgcggcccgtccgacatggtcgagccagatgttgtggtcgtcgtcgaccgtgctgaaccagccgtccgagttgcccgtcccatcgacgtcgactgcgagccaggcaagctccttgcggcgcggcgagaaggtgccgttgagcgcgcgctcgaggtccaggtgcttgcgcggcgccggtcgggtcggggacgttgtcgagaggggcgacgtccaggatgagccggcgaggaggccgacgagaccggcgcagaagacgagggtggagaggacgagccgcgaatgccgtgtctgggcctgaggagagtgtagccgcgtaatgcgccgcagcccacccacgtcgggggaggccgagagaagcagggaggagcaggcgagggcggtgtgagacggcggtgagggaaacgggttggtcagcctggcggaacgttaggtaggtagacagagcggccacgcaccctcctgcgacgaccgtaacctccgacgtcggcctcctcgtcgttggcgtcgagctcgtcgtcgtcgtcgtcgccgttaggagaggcggccccgtcagcggccgtgcggccgagtggcggtggcttgtcgaggagtgttaagtcctcgtgaccgccgggtgcatagggtggcggcaagctcgcctcataaaccgccatatcgcctggcgagagagagagagcaagatggatggagggtcgaagggagggtcggaggagggctaaagtgagagagcgtcgactgtcgctgtcgcacgcgcggtggcttcgctcgatcgcatgcttcggccggcgggcgcgcagcaggcttaagtggggctccgcggccgcgggtctagctcggtcccagcgggcagcctgcgcgcgccttcgagcttcgaagccgctgccgccagaccagtccatctcgtccatcactgccaaccacatcctcctcgcctctcgcccacacgccttgacttcgcccacaaccatcctctcctgcacccactcaccttgatgtccagcgccgcaccgatggccatcccgccgacgggcccggccgccccgaggagttaccccgagcgggccaactcactctcggccgctgccgctccagcagcaggagcgtcgtcgtcgtaccggcccgtcgccgccggcggcctctcgcccgcgccgtcgtccatcttctcatcggcatcgcccatgacgccctcgccgatcctcgcctcggccctctcgcttcccggcggccggtcgaccggcacgtttgccttcaaccccttcttttcgacctcgccaaagacgtttgccggcgcgggcccgctctcgtcgtcgccgtcctcatcgaccgcggtgggccaccagcggagcttctcgattgccggcggtgcaggcgacggcaagcctatcctcgtctcgggcttcccgggcgccggagggagcgccctcgccgacgacgacgacgacgagccctcgccgccgacctcgacccgggcatcgctcggcggccacggtggtggtcatccgccgttcggcctgccgcccctccgtcggccgtcccagccagtcaagctgccggcccagctccagagccaggtcaagcctccgtcctcggccacaacggccgcctcgggcgcgccagcggcaggctcctcgtctaccgccagcggcaagccgacgcccgctcagctcccaacgatgaacgctcaggccggaccgacggccgacaacggcaacggcagctcgcaggcaggcgccggtcggggccatggtgtccttcgccggctgtcgctcggcgccaactcgctcctctcgcgcgtgcgtccctgcaagaggttgccgcttctctcttgatccgctgaccacccaccccttcatccttgcactccagcccaatctcggtccgagcccgccccagccggcgggtcccaagccgacggtcgcgaccgcgacggcctccccacctgctgccgatgccagcagggcaggcaggcagccggtcaggaagactagcggcggcccgaccggcatcggagcgggtagcggggcgccagcgaagaagcgtggaatctcgcccgtgcgtacggctttcttgccagctcgacggacgaggcactgaccggctgcaatcctctctccgccttcgtttgcagacgggcgagcgcatcctccagggccacttctaagcactctctcatcttcgcaaaacgctctttcgctgtcgccgaccgcttaccaagcccggtcggtgcctggtacctagtatcaagccctcctactcgcttcaaaagaggtctgcgccggactctcgcttggagcttggcggcctcaagggtcgtatcaagcgctcgcttcgtcctgggtcatctctgtcgtcgtacgcccccatcaactcctcgccttggcctgtctccgactccaccgaccacgaccgcccggcctagcctcccagtcggaggccacagcgaggcccgcaacctcttgttcgctcctccagccggccgacccacctcacgtcgtccttcgcccccactgcatcctctcccttaccccaccttgcgctccactctttgctcagcttctctcgctcccgacccgctccccgttgtagcagtaattcttgcgccccttgtgtgtccgccgaccgtctgtccgttctcggctcccaaattgtaatgcgctttgtcctgccagctgggcgtcgaggcctctcgcctggcgcccttcgacaggttgcctctggcctgcgccgccgcgatgcatgactggcacgcgcggcgccggccgaagtcaagtcctcgagagcagtcgcctcctcccggctcgcacgaacacccctccccctatcccggtaaagtcaagcacgtccgcacgctagaggtcagtacttcctcttaccgactgcgggcgagcgtgctggcctcgaggagttcagaggaggcaaagcgcagacaagcttccctcctggcgagacagcgggtcggagcgacgcgtagctgcgagacgatcccgctctcgatagcccgcccgccagccgtgcacgaggggcaaaatggaagggctgcagaagagcgcggcaacgtgctgacctcctgctctctgcctcgacctcacagctccaaggaatcagacgcaacacgactcgcctcgcaccgccttcctcgcccgcagctcacgacgcgcccgaggcgacctcatctcccttcgctcgcccacccggcgaccccccttcttctctgcccgccatgtcccgccgccgaggcacgcatgatgccggcgcgcactctcactcgcactcgcacgacgacgccagcgccgggctcggcatcctaaaccacggctttgacgacgtcccgcgcgacgcccggcctccgagcggaagccacgccgggcactcgcactcccactcgcaccacgacgacgccgacgacatctcgcccctgacgcgccaggtcggtgcaggccaggacgactcgagcccagaatcgtccagcctctcgccgacgacgccggcggccaacggcttcggccaccagcacccgcccgcgccgtcgtcgcccttcctaccgctctaccctccgaccgagccgcacggcaaggcaagctcgtcgacggccggaccggatgacacggcgaaccactccgagtcgtacgacgctctgccgcccctctcgcctttgcctacccgcggcgcggccgctcggctgagcgctgcagaggtcaaggcgcagcggcacgagcgcatccactcgcgcaacctctccatcttcttccctcgaccaggtgcgcccggtccaagctacaactgacgtctttaatcaggccgttgactgacaaccgctcgctcggttccccttcttcaggccaacaggtcccggaggacgccgagagcttgcaagacggcgaggcgcccgtgaccgacataggtgaggtgccgatcacccgggatgcgcgcaatggcgcctttcaattcggctcgcagcgggccatgcttcctggcgagagcggctcatcaaccgagggcgctggtccaggcagcaaagtgaccggtcgcaagggtcaccacgtgcggctcctgcctttcgctgaagagcgcttgaggccgtgctgacactctccctctccttcccggtcaatgcagcacaagcactcgctctcgcaccaattcttttccttcatggacccagctcagacgaatccggctctggcccggggtcaggatgacgaccctttcaccgaccacggctcgcactcgcattcccaatcgcacactccgcccgagaacctgctctcgagccccgtcacgacgcacaatctcccgacgccgagctcgcagacgtctggctcgttcctcgtccgcttgctcgccctccccgtccgctcgcaggccgtcgccgtctttgcgctcttcgagtttttcctcggcgcgagcctctgggtcgacggccaggccggcggcagcatctcggtcactggcctcggctacctcgtcgtctttgactcgctcggcgtcatgggtcttgtcgcgcaccagctccttctcggtggcggccttagcagctcgagcttgcgcagtcctttcgggtgcgtcgccggcgagaggaggcccgcacagatcgcctcggctgacacgcctcgtattctctcttgacgcagcaaccaccgcatggagacgctgctgctctttgtccagtcgattttcctcctcttctcgtcggtttacatctgcaaagagtcgatcgagcacgtcatgctgctcggccacgaccacggcgaggacatgaccgaggtcgtcctgcccaacgtcttgctcgcgaccgcctttggctcggctcttttctcatccatcgtcctcggaaaccacaccaagctctcggaaggtgagtccttcgtccaagtggtcgcgtgcctcgccccaggagctgacggagcgccctctctccttgcgtcacagccgttgggaaccgcttcctttcttcgcagtcgtcaggctcccgccgccgccggtcaagccctgttgcggctatcctcagccggtcttacggcttgtttggcaaccccttctctctcatggtcctcgcctgcaccggaacgcttctcttcggcggcctcaccgtctctccgtgagtggcggcaaccgtctttgtgtgcgcgatctcgcactctaatcctccctcctcctcctcgccagcgcccgcctgccctcgctcgacaagtttgccgccatcctcgagacggtgctcacctggtgcgcagcctacccggcctcggtcgcgttcggccaggtgctgctgcagacggcaccgccccagcgcgccgtccagatcatctcgctcaacaagtcgttgcgcgaggtcgaggcacacccgctcttcgtctacctcaaggtgcggccctgccggccctgcgaatgtggagctctcgtcgcagaccacaagctgatgcccactctcgtcgtcgtagcccccgcacgtctggcggcttgtccaccatcaggcctcggcagtccttccggaaactagcgcaagtaccatcgactatggcaagggtcgcatccggccggcctcgccctcgtctgggctcaaggccgccaacgcagcctacgcagcatcgtcctgccttctggtcgtcacgctggttgtgcatatccgggaggacgtcagcgaccgtgatgtcctcggtgagttgctcctgctgccagccacacgatatctcgtagactgatcccgccctcctttcgcaacagagatgacgcgcttcgtttacgacaagtgcgccgcctcggtcggcgccgctcgctatggccggcgcgcagggagcgccaacggcggcggcagcggcatctcggaggttgccggcgagggcgagctcacggtcgaggtccgccgaggcgcaccgcgatggaacgaggccgactgatctggatctacactatatcgcaccggaatcagacgcggcgcagagggatgaggaagagcggcatgacggcgatgatggcctgcaaagacggggtgtcagcgctgctgccgtttgtgcctctctccgatagactcactgcgccgacaaggaagagcagcgccggttgcccggcgctcgtgaaagcggtcgagagcgcgcccatgaacagcggcgagaccactagcgcagagttctggaggatgtcgagagcagcgaggctctcacctggacaagcggccgagggttcaggttagatcgacaggctggaaagagaacaggtcgctatgacgtactggcccggtccgcctcgacgctagccacaaagatcgacttgatcgccgaaggaaaccccgatccaaaagcaagcaagacgaagcctgacagaggggcgaggtgctcagcgtgagtctgcgatagctgaccgagagggggagggagggagcggctcacagccggcgatctgctgccaggtcgaggcaaagtagaggcacaagtagccgagcgcttcggcccagagcgagccaaccaggacaatgacctggtttgaagaaggttaggtcagcgagtgcggaaggcacggtttgggacaatcgaacgcacatcaaagtggttggcgagtttgaccgggctctcgacgacggccacttctgtgatcgcgacgaccgtgtcggagggcgagggctcgataccgagcaagaggggcgtccgctcgtcggcgttcgcaccggcttcgacgatggtagcctgcttgaccgggtgggcgagctgccatcgatggatccaggctcggccggcccggaggatgattgggaagggcagcgtgagaaagagaaaccttgagccgacgaaccaggccatgacgtagccgttctggccctcgccaaagtcgaatcggattgcgaggtagaggatgacagccatgggcaggaagccgccgacgcagccggtgatgaggtacatgaggccaagcaggaagaggttccagtctcgcgagccaccagcctccggcttgatcggccagaggagccgcagggggtagacgggagcgaatagcgtgctcagccagccccgaggcttgcccttgtaattgccggccgtcaggtcgtccgtcgtctcggccggctgcggaagggcaggcttcgtctcgggcaggacgaggacggtgtagaccgaagctagggcgtagatggcggccgagatggcgaacggcaggacgtaggactcaggcaatctcgacgagaccaagaagcctacgcacatcgccccgatggcggtcgctgcgagcttggtgaagaacggcgtctgaggggatatgtgtcagcgcgcaaatactgctagtagggatctccttcggactcacgcggtcctcaggggtacagacgtctgcgagacaaatccctgccaagaagtcggttgacttggtggcgagagtcccggcaatcgcgttgaagccgacaaggctgaggataacgggctgagaagggtagccaacagcagtcagcgagctgtcagagttggcggtaggccaggtcgacaggaccgaccaacgagttgctccactgggctgcgatgagtgccaggcttgagaccgagccacatagcgcaagggccaccagtagcggctttcgtccgacgtgttcggccaaccgctgaagaggcgaactcgacaggagagctgcgcgtcagaggcaaaagtcagcggacacgacgtcaagacaagcagcagcacagacagacgacgctcaccgacaaccgagttgaagacagacgttagggcgacgatggacgagctgcgagcttcgatggccggcagcctgcacatgggcgcgccggggtagggcaccgccgtcgggtccgctgaggcgaaccaggcgcggcacgagaagtagcgctgcatgggggcgaagcacaggagcatcagtcggatggaaagagtcgactggtcgcagacgagagacctacgatgagggagatggagatcgctaacgagtcgacggcagccggtcagcggagacgtcaagccgaagcgccgagcccgaaccacgtaccgatcgggatggccgccgcgaatgtcgatgttgcgacatacaagatgagtctgctgaggacgctgccggccgaaggacctgatgccatacgactggagctcatgtcgggcgtgtctgggatgagttgaggttgaccgacgagggcagactgagcgagcgagaggcacgggctggtggtcgagcttcaggcgggctcggaagaaacagatgaagcaggagcggcgtcgttccttcaagctgctgctggtcgctcgagctgctgctgtgccgcttgagtgtcgggcgactggcaggagggtgtgggtggcaggagcgagggtgagctgcccgaccagtggcacatcatcgctctgccctcgcttgccatgcgcagctcgcctcgaggcgtccgcgcggctcacgtcggccggccccgacggcacagtcccattccgactctcaacagcattacttcgacatgccgaagcttttagcgacctctcgtgtactcgaatatccattaacatgctacaggcttcctgatgtcgatcgcttcttcggcgctacgcctttgccttgccatgggccgtgagcctgagatagcagaggaaacggtaatcgtcagccgagttgtaccggcacggcacgcagcgattgagaatgcgtactttggtccgtccgagcctgttagagcgttgccccgcttggcctctgccgaacgagctgcggcccgccgccggacaccctcggcgatcgccttggcctcgtccaagccgcgcggcgcggccggcttgacgtcagcctcggccttgacagtctgctgctgagtgagaggacagatacggtcaggggctgatattctagatcatacggttcgacttgagcgcaccttctttccgccggcccggtgcatgagcccgagcaggccttgcgaaacgatgcccgaaatgatgagccagcccatccggggaatcttgacggcgatcgtgttccacttgccgaggtagtggccccagatggcgatgtaaggggcgctaaagtgaggtcggtagtcagctgctctgttcagatatcgctcgcaagcccggctgctgcagagactcacgcccatcctccaggagcatatttgccggtccatacggggatctccttccagctgccgctggccaggctcgcgcggagaacgggtccgtccggccgagcctgacgcgggttaaggaagcgcacgtcctggccgtggttcgagacaaagaccatgtacggcggcctgatggagcaagcacggccgtcagtctcaagtatagactgtgatacaccggcctacgcacttccaaatgagccagcgcgacgtaatctcggtgacgttgacgtagtcgacccgagcgaacgagacgtgcgagaggtcaagcgggtccgagccgttggcggcaagcagcttggtcgtattggctgccgcggcgtgtgcgtcccagaagagctgggtcagaggctcggctttggtgccgtgtctgaggagggggaacgaggaaggcggtcagcctcgacgccgaggcaaggcacgcgggggcggggccggccggggcagctggcgactcacacgacgacacaccagacgcgctctttctcctgcgcctcagtcaactgctcgttgacgacgagctcgtcatagttgccgtcggtcaggcggacgacgccatcctggacgtcctctgcgtcctggtacgagagcgagtcggagagcttcttgtagatgccgccgacgtcaatgcccgtcgctgtatagaccgaggtcgtcgcgacgtcgatcaaactttggacgctcaaggccgaggtcgccaggggcagggccagcaaggcaaccgatgagaggatcggtaggcgcatggtgttgtcgcgctgggagatggcagtcgaagggaggatcgagggctgcgggtcggaaggagcagccagccatctcggggtcagccttcgctctatcatccggcttgctcctgctcctcacctgctggctctgctgcactgacagatcgcgaaacgagagacggggagatgtggttggtaggcagacgctggcgtgctggtcagtcctggcctgaaccggtcgtcggtcgtcgcccacccgagccagcagcaccacgcggggacgcgacctcgatcgcctccgccactttgtcctccgcctggccgctatcgccagaccgcggtgcagaccttccaatcaagcgacgcgtttgcgaggtcgtgaaagatcatcaagagccgtcgcccgtcggctcgccatcgtcctgcaacgcttgctaaatctgctcatccaactcgctgccatcggccgcatcggtctcgccggccggcggctcgtcgtccaagtcgtctggctcctccatcagcggcgatggcgggccgctcttggccgccagactgggtggcctcgtcgacaaggcttcgccgtcgtcgtcgtcgtctgctggctggaactcagcctccaacgtcttgacccagtcgcgcaactcgcgcaaggggtcatcgaggctcagcccgagtcgcaaggtcgcctcgtcgaccgtgccaagctcgccggcgaagacgccttcgaccagaccgcgccggaggaacgggacgaggccgtcgaggaaagccctcgcgaacgcgcggaggaccattttggcgtcgcgctgctcctggaccgacgggccggccgacacactcggattgcgtcggtggcctggccgaccacccgcacccgttccggcaccggcaccaccgctccccgcttgtgcagcggtcgtggtaaagtcggaggccgcagtctggctgtaggagaggatggccgacgccactcgaccgagtgaggtggcctgttggccgacgagcgacgggaaggcggcgagcggcgcaaagagccgaagcgagttgagcgtcgccgtatgtgtgttacagagctgggcgagcggcggaaagagggcgaggaacggcggcggcgtctgggcggaggccgtcaaaggcgagaacggggccggcccgaggtcgagatcgagcacagccgccagactctcagccggcagcatccacgccgtcggtggcttgccactcctgagtgcgtcccggacggcagcctcgaccgccgactcgccgtctcgcatgccacggaggttggtagcgaggacggcctgctcgaagggctcggtgacgagcgcccgaaagtcgagcccgacgcgtgcaaacgacgacgcgcagtaattcagttgcgtcaagagcgacgacagggctgaggcgtcctcgattgttgggacaagtgttcgcaggaggccgacgagggccgcaatcgcctgctgagcaaaggtgttgagtattggcggaggggccgcggcagggcccgagcccgagggcccgtcgacaaagatggtcgcgaactgggcgacaatgtcgtagacgtgctcgcgaaagaggtcgatgtagcgccggacgtagcgcaccgggtcgcccctctcacgctcgatctcgacgagctgcgtgcggtagttgtgctcgcggccggtgaggaacgcgacccggagctcgtcctcggtcaggacgtccatccggcggaggaagccgactgccttgacgagcgccggcagcttgtacggctcgcggaggagagccaggagctggacgagcatgccgacgaggcccttctcgacctcgcgcccgacgtccttgacgacggcgacgtcgccatacttgcgctccatctgccgggcgtgggcgccgagctcgagcgcctcgtggtagtagccattacggacgcacgtctcgaggagctgcggcacctcgagtaggtcttggagccggtcgagatgctcgaggacgagcgcagccttgctccggtcctgctgcgtcgccttcgttgaggcggcgaacgcctgacactgggcctcgagcgacggcacggcgtcgagcaacgagtcgagcgacgatgtgaacgacgagaaggccgtgtggacgtcagacgagcatttatggaccatgatgaaggtccgatactcgcggaagcacagcgccgtgagctcgccggcgacgaagtcagactcctcgcggattaaggccggctcggcatgcagggcgtcgagcgagaggctgaagggggcgaaattgattggggtcaggcggcacagataagagcgagtcatctacgccaagctcggagctcactttgagagccgctcgaggtactcggaggacgtatgctggagggcgggccacgacagacgggagctcgtcagtcgaggagacaggcacgcgacgccagctgcaaccctttggccagcagcagtcaagtcggacgtacgctcgtgaagagctcttcagggtcgacagcccgccgcagcctggcctgctccttcagcaggtcggccagcgtcgggatctcgtcgagcagctcatcgtcgtccccgagcggcgaccgacgctcgagagatccgagagcggcgtcgccatccatctgcgcgcgcgcgttgccggcccttgcgctgcaacctagcactcgttggtcgggctattgacggagtggatagaggtggggttgaggtctcgtgaaatttgtcgagcagaagatgggatggcgaagagaaggagatcttgacgttcaagacgggcggaagggacaagcatgcgtctgcacagggacggccgcccgcgagccggctgcgctggccaacaggcggcctgacccaggctcgttcccgcttgcctccatccttgaccctcttgcccgcccttaattgagcagtcgtatctctccagggacttcgctcagtgccagcagcctcaggccgacaatcgacacgtaagccatcaggtgatacttagaccgactctcgcgcgatccctcctcccgaagtcggcgcagctccgagcccgcctccgacgcgatggcgttagcaaaagccaacaagcagaactctggtccgtcctcggacgtgggcgctcaatcagggcaggaaactgacggacttcgcctcgccggcagccgtcaagcgcattatgcaggaggccaaagagcttgccgaggacgagtcgaccgactacgcggcggccccgctcgacgacgtgagcgcacctgtcactgccttgcaccactcgtcgctgactcaatcgctcttactgcaggatctttttgagtggcatgctacaatcaggggcgcgcccggcacagactatgagggtggtgggtgctgtcgctgcgacggcgagcggaacatcgtccgcagtcgaccgcctcgagctgaccagcgctgctcttctcaggcctctaccacctccgaatcctgctgcctgcgacctatccgttctcagcgccagacatcatgctcctcaacccgaacggccgcttcgagaccaacaagaaggtctgtcgccctgcctcgacttcggttcgcttacggctgccggagggctaacccactcgaccgctcgcccatagatctgcatcgacgggctcacctcatatcaccaaggcagttggcagcctgcctggggtgtccggacggcaatcgttggcctcatgtccttctggcacagcaagggcgaggctcttcagtcggtcggcgcgctcgagttcccggcagcggagcgcaggcggctcgccagaatgtcggtctgctcattgctgctcgaggagcacctgcagctttgctgacccccttcctcggcgtactagctccaaggactggcgctgtgacacatgcgatgcgacctgcaacgacctacttcccccaccgccgctgccgccagcggcaaacgcagtcgcatcgtcgtcgactccctcacacccccacgcagaccatagttcgacgccttccgggccggacgagacggagctcagtccgctcgggatgccgatcatcccttccacgatgagcccgaccgcccccagcctggacgcggttgacgtcgacctcgcctcagggcctgccgcagaggtcggctcgcctcatcatccgctgtcaaccctcgcccccctacccccctcgccctcagtagcaatcgcccttctccctccctcacggcgaccaccaccagccgcaccaacgacacccctctggctcgacggcatcatcggcgccttgatcgccgtcgtcgtcgttctcgttgcccggcgcttgatctagccagtgtccgccctcgctctctgtaatcacccctgttgacatccagtgacatgttgctcgtgtttgtggtgcaagtgggaggaagacaggtcgaaaagagagggggcaagtgcgagtgccaaatcgcgcagcaacgcgcgggcagtacaaggtgggtggaagaagccgtcatcggcagcgacaagacaggattgaagtagaagggtccatgagttggcgctttcagcaatgggcaagagagcagaagttggggtgaaaagaacgtcgagacgagccgcgtgctcagtcgtcgtcgtcgtcgctgcctgcagcgtcggccgccttcttcctcctctgttggcgcgcggtgacggggggtggtccagtcagcgccagaccagagttaacacacgctcgcgagaacatcacggacgattggcagcttgacgccctgcttgaggaaatgccgcgtcaagtcggtcgtgtcaaggacgccgacgaaccgcttcgcagacatgacggtgaaaggctccgacaggacctcggccaggagcggcgacggggatccaaaaattgctctgcgagagagagttcagtcgtcaacggctgcatcgccttcctgtcaatgagaggcggaggacctcactggccgaccttcatcaggcagaagcgcaggcggaagcggccttctgccctgacgctgacctcatgaccgaaaaagaagatgccgggctcgccgtcgaggtccgtcaggcggtgagcggtcgtgacgaggccgccgaagagcgcgcgagagtagttgccggcgaccggcggcagcgcgagtggcggtagagagagcgtcgacgaagctggcgagaacttggaccggtcgaacggcgagacgggcgcaaagaggggggccgtcgacgacgacgacgatgagggtggtccgaggctgaaggccgacatggcgtctgtcggaacctgtatcgagtcagagcgccggttccgctgccgctcttctgtcgacgagagcgaggatcgttccgggatgacctcgggaatgccagacggccgatacatctcggacggccggttgtagtgcacctgcggcgcctcgctcgactcgaacgactcgcgggtggagtaggacggggcggtcgagacgaaagtcgatgtcgaggaccgccgccgctcatacggatccggctgcaaaggcctgaactgcaggggcggtgcctctcggctgagagagttggtcgactcgagcgacggctggcggatgcctaccggcgggcgcttcttgctcaattcagtctcgggcggtggcgaccagccggtaatcgccagatcgggctgaggcgtgcgcgacatgccgcggtagactggtcgagaaaaaggagggttcagcggctggccacggggtccaattgcagatgaaactcaccgggctcgggctcgtcgacgagcatgtctgtcgcggtctgtgagccgtcagactgcggcgtgatgagaccggccgggttcacggtcggatggacgatgaggttccgctcctgcatgcccgtctcgtcccagaggtccatcgacatgacgagctcgtgaatctgtacgttcctgtgcgatggcgaggcgggaagaaacgaaaaaggtcagcacttgcagcaggtcgactcatccccgcgagacgcacatggggtcaacgacccggccttgtcggtcgtagacgatgcacttgatgatcggcgtcggcgacaacggccgtcggtcctgaggcggcgtcgagtgatcaggctaagctttgagcaggagcgcgctgtagagacgggaaggatcgtaccttgtcgccaaagccgcacgctctcgcgcggacgggctgctggacaacgacaaagacgtagcggagcgagtcctcttcgatgtcggtctttgcgagctcgtcctcgatgcccatcgccgcagagtcgagctgattcttcttcattcggcgctgcatgatgcgcgccgcagcggccgaggagcggccgaccttgcgaggctcggccggccccgtccagccctgcgggaggttgaagtcgagcgggtcggcgtcggaccgggcgtcgaacgagcgcaggctgctacggtcgtcaaaggacgactgaaaggaccggatcgaccgcgccttctgctgttgcggctccggatgataagagaaggctgaggtgatgctcgagctcgaccgtttccgagacaggcctggagagagaattggcggaaggtgtatcggcggctcgtcgtgcgccgaggtcggatgcggcgactcgctcacgcgcagccgaaagtgatccgggtccgagaaggtcgagtgccgcggcgagctgacgttgtcgaggtacgagggcggccgccgatgttcgagatgcggcgtcgtattgctcgacgaggccgggaggggcagcacgcggttgccgtaggccaacgaggctgacgagctcgacatgggccggttgaagcgggccgggaccgagtgcgtcgaggtgaccgagtggatgctagccgtctcggccgagcgatagtccgagtagggtcgcaccgaggcacgctgcgcctcaactggcggcaagtattgctgcgaggtctgagcccggtggatggacggcgccggcgcaaagaccgaagggaccgacggcatccggacgtcggtcggtgtgctctcgcaagaggcggccgaagagtgtgacggggccggcgaggtcgacatttgctgcatcaggcaaagagcagatgccaaggtcagctccacggccgcacaggcgaggccgcagtcgttcgaaagccgtacgcggaggtccggagcgtacgagtggtactgggggacgtagggcttgctcgagctggcctggccgaccgtcgtccggcgcggctcgtcatgcgagcgatagctcatgccgccttcaggcaagacagctgtcgatgcggggtctgcactgaggtttttagacgcacagaggtgatatcggatctgcatcagtgctgagcgtcagagaagcagcgctccgagagtgttgggccacagctccggcccatcacgtctggcaccggtcgcccggccgagccgggacggatgatgcagaacgcaaacccgttcctccccggaaccaagccagccgtcaatccttcgcgcccccttcagccaacaaggaaataggggctcgagggcggcgtttgtcgacgaggatatccagcaagacggacgcagtcgaaagaagggtcgtcgaagctctcgacagccaaccagctccccgaacccaaagctaggtctgcccgaatccaggagacaaccagagcttaaagaggagggaacagcagttgtcggacgtacctagagagcaggttcgtggggagaaggaaagagctgtcgcgcgaccggttcagcggcgaacttgctcgtggaccggctgcttgctgctgaaacggggtccggacagcctccggcggtagagctgggagcgaactggacaagcttgcgcgaccagtgactgttaatcctagcgcgtggttggcctagtgcgaagggaggaaggactgagcgagggaggaaggatggagagtaacagcgtgatggtagacaggaggaggaggacgagagagggagcacgagaggaggagatcagcggaaggcccgaagcactggtcccgagaagggtctctgccgggcggagggaggcgagagaagtgggggctgaacctcctgcgcaggctccgcggggttgcgagagaggagcgagttgattgccgggccggagaggcaagctgcgacagggctgacgggcgtctgggcgacgacgacgagaaggtgctgtcgacgacagaggagaagcgagctcggttcagcatgcgcaacaaacagcccgcccgcccgttcgcccgctccctaaagagagagggagagctgcgtgcaggcaagggacgacagggacgaggccctccccgagcgggcggggcggccggccggccgggctggacgcaaaccaaacacgcccacgcgaacgcacgtcaaaggggttccgacaagggacgacggcctgcccgacgagaaggaggaggggcggaaaagcagatgggaagaatggtcggtcgtccggtaaccagatgctcggggctgggctatgtgtcggggcaaaaggacggctcgtcgtcgacgtcgagagcgggtgcggtcgaaagtcaggtcgaggtttcgagccacgagagagagtttcgctttgctgaggctcacgagacatggcctgctgccgatctcacctagcgcccggctcccgtcaaagtgcctgctgaaagaggttggcgcgggcggtcgctgcctgggcaatgagagagccgaaaactgcgcgtggaagagtaagggagacgcccgtgagagatcgtccgaggctcgtccgctgtccgtgcgttgatcatcgctccctccgacagagcatgatcgacacctggaatgacggtccggtcgatctctttgctccaacctctgccgacgcaagacactactcctcagcctctggtttttgtctagacgacgcccggagccggtgcgcacaaggcagtcctcatacgggtccgtcgagctgagtagagcggccactccgcagacgatgcaaacgaaacacagacaaggccctgcgatcatggccatggtccggcgcggttctgccagcgcctcagtcgacgtccatcccgccgacgccgcgcaccctcgacgccgggttgcctgctcggccggcccggacactgcgaccgccccgaccaccgcggttgcgactgcctgtgctagccggctcggtcatctgctccgagcgcatcttcctgtttagtcgagggtcggaggctaggcgtcagtctctaaggctaagagagaaggagagcaagacgcacgagtcgtcaaacatgtccatgaggtcgccgtccttcgccaagccggccgcggcagaggcaggagccaaccgacggggaggaggcggaccacgcgcggcaggtgcactttttgttgccagtcccaggcgctcaaagagaccaccagccgcaaccttgccgccgccagcaggaggcatgccagctatccgcgagctgagcgacgtcgacctcggagcggctgccgggcgggcaggaggcgcactcggccgctcaacggggttcctgcgaggcgccggagcatgtgctggcttgagcgtgggcggcgaaggaggaaggggcgcgggtacgtggagggcgacggagatcggccggccgtcggcaatctgaccgtcgaacgccttgatcgaagcctgggcggcagcaaactgctcgaactggagcaggaccttcgatgatacgggacgaaaagcctcaatctgtcagcaagcgcacgcacaaggcaggctagcgcgagatgacgaaccgagacggagcccttcggcgcgggcgtgtccttagtcgcgatgatggcgccaaactggtcaaaggtcgtctgcgaggaaggagcgacatcagttgacgacttgccgatcgggtaagactgggcgacccaccttgacgtcctcggccgtcgtgccggcgaccaggttcgtgacgagcacccacgtcttgccgctgctgccgaggatgctgatcggcttcgtctcgcgcggggcaacctcgcgcatctctgcgtcgaccggtcgattcgcacgcggctcacgaggagtaggagcctgctgccgctggggctgaggtttccggccgagcaagtcgaagctcgcgtccatcaggtcctgccctccagcgccgccgcgggcacggccgccgccgccaccgcgagcggcgatcttggcctcggcggccgacgagccacggtccatttgcaggcggaaggcgaggttgccgccttggatctgctggccaaagaggtcgtggccccacttgcccggtgcctcggggtcggcgggggtgtacttgagcaacggctgctcgcgatgggcgaaggccagtcagcgcggctctctctcgcctgcgacgaccaatctcgacgaagctcaccgtgtagggtccggcgcgcttgcctccgtcgcgccactgaagggcgtccttgccctgttggtagatgcggatccatccaggtcagcgagcgcgatgggtgggtcggcaggtcgcgcgggcagtgccgccgcgcatcaagaagcacggaccttgccgttgccattgagcgacaagcccgggccgttcactttcaagctctgctccgagtacatggtggggcggtccttgtccgatcgggtctgtcgggaaagggttcgggcggaagagagacgacgacgagggtggcagttgatgtcgagacacggtcgtctcgtccaggtgggccaaaaaggaacgcgttggccggccctcccaacggccatcccgcttcgcacctcgcctttcctatcccatcgcacacgcaggcatccagtctggacaggctctcgaggacggtcttgctagcgtcgactcggcatctgcaccctccatggcgggcacggccaagcggtcgccgtctcctggcccgggcgggtctgtcgcgccttcgcccaagcgcgcccgggtcggctcgacgccgacgacgctgtcgccctcgcagtccgaggccgacaagccgaccgacgcagcctcgccgctgcccgtcttctcggccgccgatggtctcaagccgtcgagcgatgcgaagacgacggcgcacaagttttttgccgaggctttcgtcaacgaggacggccacgcctccatcgccggcacccggcgaggcgacggcagcgactttcatccgccccggacagccgccgagcggggcgacgacgagccctatggcctgatggacgtcagtatgggtcctgccggccccgaccagggcggccggatgaccaaggacgaggaggccgagcgtcgcgagatcgaagaggctgccaagggcgtcgccatcgacggcaccgagctcgccgacgcgaaggaggtgcgcttctcgtgctgctgcgtctctccttttttatagtgtgctgacggggcttgctcgtgatgtccgacggaccaccaggagaagcgtcagctgaagccggccgcgctcgaggagctcaatcgcatcatccgctttcccgtcatcaagaacgacaacgagcctgcgtcaatgatcctcttgactggacttaagtgcctgtgcgtgccgcagctggcagccaaaactcacgacgcgggactgacggcggcctttggcactcgacctcaggtttcagaagcagctgccaatgatgccgaaggagtacatcgcccggctcgtctacgaccgcaaccaccgctcgctcgcgattgtcaagcgcgggctcaaagttgtcggcggcatctgctaccgaccgttcgagaaccgtggctttgccgaaattgtcttttgcgctgtcgcaagtagcgagcaggtcaaggtccgtctgcgacgcgcacgagacagggccgagccagaggcgctgatcgctcaacctccgatctgtacggccctctccagggctatggcagtcatctgatgaaccatctgaaggatcatatcaaggacgtctacccgacgattcacagtttcctcacctacgccgacaactacgccatcggctacttcaagaagcaggtgcgaccgtcttgagggtgaagacgccgccgcggcttgacggctgaccgcgctccatccatcgcacaaacagggcttctccaaggacatcacgctcgacaagaccaagtgggtcggctacatcaaggactatgagggcggcacgatcatgcaggtcagcccgaatccttccctctttaccctgccagtgagccctcactgacctaagttgccccgtcatcagtgcacgatggtcccaaaggtccgctacctcggcgtccacgacctactcgccaagcagaaggaggtacgcctcactctcggctgcgtctgcaagccgatcgctttccccctgacacgactcgtgtctctcagattattctcacccgcatcaaagccatctcgcaatcgcacgtcgtccaccccggcctcgaagtcttcaagaatcggccggaagcgcccaaagtgccgacgccgcccaccacgccggtcgtccttgccccgtcggccccatcctcgcccaagcttgcgatgccggctgcagaggaacgcaagccttgggaggcgagtccgacccgcgagggccagtcgcttcccggaagtgaggcgcctgagcctgcggtagagattgaagtcgatgccaggcgaaaggaggaggaggcggcgcaacgcaaaaaggaggacgaggagcgcgaggcggccgagtgggtcgtccagcccgagcaggtgcccggcctcaaggagagcggctggaccaaggagatggacgagatgtacgcccgccaagagctgccctacaaatccgagattccgacagactgacggcgtccacctcttcctccgcagctcgcgtcggccgctgcgcggcccggagcactcgctcatgaagcacgtcctgaccgacatgcagaactcgccgtcgtcgtggccgttcgcgaagcccgtcaacaaggacgaggtcgccgactactatctcgtcatcaaggagccgatgggtgcgtgcgcatgttcgcggttcacagcctgcctctcatgaaggctgaccccgttctgacccccctttaccccgcagacctgacgacgatggagctcaagctcgagtcgaacctctacccgacgatgaccgagtttctgtacgacgccaatctcatctttcagaactgcaggcaatacaacccggagaacagcacctacgtcaagaatgccaacaagctcgagcgctacatgaaggagcgaggtgcgtcgttctggccgcacgcacttgcctcgcgcgcccgactgatcatagcctatgctgtgtcgtaattgcagtcgccgagtggaccggttgaagcccgtcttccgtcatgaggctgcctgtcttggcggccaggagcgagtcgcctccgcccgcgcctcgggctcatcgctccgcgcagtcgtttaaggcaagttgcggacgccggcttccgacattgcttctgctctggcgcacatgccatggggctactcgccccgccttcgacgtctttcgccaccgcacccgcacccgcctgccttgcgtccaacggctcttcgacgacgccgcggaaccctgcgttttggccgcggtgagagaggggaagatttaggccgggcggcagtcacgccggacgctctgccccaccagtgcagcgatgtatgccagcctcatcacctatccgccagcgacgcctcttgtctcatgcgcaagccatcgatcagccgccgtgcagcgtcgagatgagcgtgatgcagtcgcgcggctcgagcacatagttgagctcgtcctcgagctcccagtcggctgcgaacaaggaaggcggggtcaataaggggactaaggcaagtcttgaagcgccagaacgcactgtcgttgatcaggacgagaatgccgggtcgactgcgggggagcacgaggagttggcgacggcgcaagagtcagcgccttcaggcacagggccttcatcggccagacgcacacagtctcgccctcccggaagagctcctcgcgctcgcggaggagatgcttggccaggtagtcgatcaggaagcgcatgtcggtcttgcggtcctcggtcccggccggcgcgcttgcgtcggcggggacgaacgccggcaggacgagctgatgctttggctgctttgagaaaagcaggtcgagtcctccgctgctccaacgatcaggcgaattcgatcagcaacagatcggctcaagaccaagaggcgcaggggctgacccaaactcgacggtcacggccagcgtttcgccgtcgccgccggctgagcctgcggccgaggagctgcccgctggcgcgacatccttaccctccatcgccgtatagccgagtccattgatgctggtgctggccatccgtcctactgagctgcttgcctgctgtaaagaacgggagtggaaggggtcggaaggaggtggcgaaaggaggttcggcagtgacattcctccgtgccgcatgccgccggctttgaccgtcgtcgaccttcgcggccaacaagcagaaggaagtcgagtcgagctcgctctccaacccccaccttctccatcgaaccctgcagttgcccgtccccatgttcgccgcccgaagtgccgtccgaagctggacgccgtcgtccccttcaattgccgctggccggccgctcgccaaaggtgcgctcgtcgccatcaggtcgtcctgctgcccggctgacgccgacgatctccccgacccagcctcccgtggcctcgctacccgatgccgctcgtacagcgagcaggcgccgccgccgcactcgcagacgagccctgccgtctggatcgccgtcggtgccgtcgcgactggaggagccttctacgcctggtcgtcgctcgttcgtgccggagcagtgatgcccgcctgtcgagcgcaagcccatgctgattctcttctgcaattccattcttcgcctgcgacagacctcgggtgacggctcgtcgacgacgcctgcccaatcgacgacccttattgccggtggaacgtcccccgtccgaccgccagagattactgcgactgcgccgggtgcgccgacgaccgctccgccagcagccagtgggcccgtcaaggtcccgacggtgcgtctgcgtgctcttgctatcgagcagacacgacgctgacgaacatcgcctccagtccccgcaatacgatgagatggtcaagtacgtccggtccctccaggacaagattacgtctggcgtcgaggcgctcgagcggacggcgccggcggtgccgcaagcgtccaagtcgtggctctcgtccctcttctcgtcttctgacgagtcgaacattgccatcccggcgacgtcgacgacgcctgccgtctttctgcacgactcgtggcagcggcccaactcgctcagcaccggcacctcatgcgtcatcgccaacggcagagtcatctcaaaaggcggcgtgaacatctcgatatcgcagggcatgctccctccgcatgcggtcaaggccatgcgagctgaccacgcctcgatcaacaacctcggccagggcgacgttgcgatgccgtacgcggcggcgagtctgtcgctcgttctccacccggtcaacccgatggctccgaccgtccatgccaactatcgctactttgaaatctatccgaacaaggacgacccgacgcaggatcccatctcgtggttcggcggcggtgccgacctaacgccgacctacctcttcgacgaggacgcggcccacttccactcgacgctcagggccgcctgcgaccagcacggcgaggcctactaccccaagttcaaggcctgggccgacaagtacttcctgattccgcaccgcaaagagtgccgcggcgtcggcggcatcttcttcgacgacctcgacccgtcgtcggccgtccacggcgactgtgcccgctgggccggcgccgccaagccgagccggtcagagatctttcaatttgtcaaggactgcggcgactcgttcaacgcgtcgtacctgccaatcctcgccaagcgaacggcgatgcctttcaccgagcagcagtaccgctggcagcagctgcggcgcgggcgctacgtcgaattcaacttggtgcgctcgaattgtcacgcgccctgagcttgcatccttgttgctgactgcctgtgatgtctctgctcgccctcaaggtcaacgaccggggtacccaatttggtctgcgcgtcccgggcgctcgcgtcgagtcgtgcgtcgtccttctacgccgcctttcgacccttcgatgcttttggctgacagtcctcatctcatgcgccgacggcagcattctgatgagcctgccgacgacggcccgctgggaatactgcaccgacatgggcggcgagggtaccgaggagggccggctgatggacgttttgcggacgccgcgcgagtgggcgtagagtgcgaggcaggggaccttgacgataaatgcgctgcctgcttgctcgtgccccccggccgcacccgacgaccttcatcaacgacattgcccgctctctgactcttttgttgccgcccgagcgaagccgaaggaggcgcttgtcggccgacagcctccgtgcgacggtctggcacatgagaggcttggtccgacctttcctttttttccttctggcccgagccgggctcgaccgggtactgtcgcgcgcctcagctcgcctccctctcttaagggcctccttcccgagtcagagccgacgagtgcgcaactcgccagacatagctcatcctcgtcctgctctcctccatctcaaacgactcgcctcgctcaaacctcgccgccccctcatactccggtcgcacccacgctcaggctccctcccgaccaacatgccgccaacaggcctcgccgtcccggccacgtcacctcttccagcgccggcccagtcgagttcgtcagacaagaagtcaaagatcccactagggacccatctcgttgcaggcggcatcgctggtacgtcccggccccgctgcatggccgaccatctcgggggggggggcgtcgctgctgctgcgcgtttcacgtgctcaacctgacctgccgtttcccgcctcctccttccgctcgtaggcatgtccgaggcgtgtgagtcgaggccgctaagattctcctctttgctatgctgaccttctcttgcgctttcaggcgtctgccatccgctcggtgagtttgtcgcacacgcgcgcagctggtcgtcgcgctcgccctcggcgctgtcgacaggagcgcctgctgacccgattcgagtcatcccttgcagacacgatcaaagttaggatatctgctagctctactgcacttggacctctcctctgacattcgtgctctctccaaccaggtccggatgcagctcacgcgctcgcgcaagctcaaaggcgttagtcgttcgctcttgccgcgcggctgaagccgccgacccctgctgagacctagcccttcttcgggccgaatagctccccccactcggcttcttcgcgacgggcaagcagatcgtcgcgcgagagacgccgctcggcctgtacaagggcctcggcgccgtcattggcggcatcgtccccaagatgggcatccggttcgcaagctttgagggtgagtcgactggccggccggctgaccagtgactaacatgcccctttctgacacttcttattgcgtcactccagcgtataagggtgccctcgccgacaacacgacgggcaaggtgccgaccggcaaggtctttgtcggtgcgtttctcgcttccggtcgccttccttggcgcgtcgactgacctctctgttcctggtccaaacagctggtctcctcgccggcgcgactgaggccgtcctggtcgtcacgccgatggaagttatcaagattcgtctccaggcccagctgcactcgctgtcggacccgctcgaggtccctaagtaccggaacgcggcgcacgccatgtaccggatcgtcaaggaggagggcgtctcgaccttgtatcggggcgtgactctcaccgccctccggcaagcgacgaaccagggtgtcaacttcaccgcctgtgcgtcggctcgattcttagtatgaggccttcctactcgacgctgacggccgtcgctgctttcccctcacagaccaggagttcaaaaagctcgccctcaacctccagccggcccttaaagaggctggcgagctgccatcctaccagacgcttgtaatcggtcttgtcagcggtgcgatgggccccttctcgaatgcgcccatcgacacgatcaagacgtgcgtcctctttgcttgtctgagccctcacgtgctgcgctcacccccgccctatcgatcacttacgcagtcggatccagaaggcatcgcgcctcgaaggcgagacggccatcagccgcttcatgacggtgacgacgaccatgttcaaagaggagggcttcaaggccttctacaagggcatcttcccgcgtgtgctgcgggtcgggccgggccaggccgtcgtctttgtgtgagtccgctcaatccgagatagctgtccaaaggctctgacaactgacgtcggtccctttcttgcgacccgcagcgtttacgagcgcgtcaagattgtcatcgaccggatgaagtcggccacctcggacaccggagcctcttacgaggagtgacgagttgccctacccctctgtaccccccttttgtatcttgcacctgcctgcgtcactctcgctgtacatcctttatcagagatgtctcgcgtcaaagggatcatcgctatgtgcaggccgttttcaactaggcgtacgaccggagcacctcgttcaggccctcgcgctgcttgcagttgtcgaagtggaaactcttagcgaatgcgtcgagctcgtcgtgcgacaggtccttgaagtaggcggcgtattcgggatctgagagggaagaaggtcagcttctcgacgcgcgcagaggccacaaaaaaacgcaacttacagagctcctcgctaaggaggatgttgcgcaggtgccggccaacgtgagtcgaggtcgaccacgtctttgggtagcgctcgtgaatgtgcggcgcctccttctcgagcatctgctcgatcgggtcgtagaggtgctggacctgcgacgtgtttgtgccccattcctgtgtggggacaagcaaaggacgttgcgtcagtcgcgcacgagagagcacccgggcaggtacgcacgtcgactgcgagccgcttcttcttctcaaggaagggcttaagggcctttttgtaggccgagtcgtccgcagcgtggaccatgccctgaaagccgaggtccctgagagaggaaggagcacatcaacaagttgcaacatgggcaggtgcgatcaaggcagcccggacgcacttgtacagccagatgctccacgacgacccggcctcgtggtagatgttgagctggtccttgagcaggttgtagcgctcggcgttcgtcttctcccagtcggcgtcatccgggctagcgtaaaccggaccgaactcgccattccactgcggcgtgccggtcgaggccataaactcgaccttgcgctgccagctccgacgcagcttgcccttctgctcgtcggtaccctggtagccgcccgagccgtcaaagccgtacttggagtctgtcgaatcgagggggggggggcagctggtcaggttaaatctgacgatgaaagacgccaagtcgggtgcgacgcacagtcgtggtaggcgtagacggtgttggggtaaggtcggtcgaagcagctgaagtcggccgcgaaggtgttctgcaacgtcgagaacctcggcgtcagcgagcgctcggacgtggtctgcggccgagctcgacgtacgccatcgaggaacaggatgtgcttagggtcgaccgctcgcaccgccttctcggcctggtcgtaccagcgctggagccggaagccctctgggtcggtcggttcgttcagaagattgtactgcaaagcgcagggggtcagcaattcagcgcctagagtgaattaagagggaaaaaaaactgacgcctgcgacccaagtgttgtccttgtagcggcgggcaaactcctcccagagcttgatgcctcgcttctggaagtcggcgtactcccaaaacatggccatggcgacgccactgtcggcgtgccagtcgatgttctggctgcaagcgacaacgaagacgagttagacaagtccctgggtcggccagagcagcagagcgacgcaccctcctggagccgcatgcaggtcgatgacggcaaagatgccggcggcgccgcagatgttgatgacccggtcgagccaggcaaagcccttctccttccagaccccaggctcgtcatccgactcaaagtggcggtagttgacgggaatcctgattgcgttgaggccgagcgaggcaaagaaggtggcgtccttctcggtccagaagtactcgaggaagcggtcaaagaagtagtcgtacttctcctcgcccatgactttcttgagcgcgcgccgcatgccctcctcgtggccggggctacatgatggatcggttatggatctgatcagctgttcctcatcaaggcaagtgttcaagcgcaacgcactagccggtgatgaagttcctgtcgacaggcgcaggcacgagagggagggaattagtttggcgtcagctctgtccctggcgctagtaagcgaaaaggcacgcactccatattcaggtggccgccaaggccggcgcccttaaggatgaccgtctcgccctgctcgttgacgatgcggtcgccgtcgcagcctgtcgtagcaccggccggtcggcgtcggagatcaaccgggccgaggacgagccgaaagcgagatggcggttagtgcgtcgagggatgcgaggaatgaccagagataaagcgggcaacatcgccaagagcagatggcggggatggcggcgagatagtcgtcaaggtgggacgacacagggccgagggaaggcaaggccaggcagggtcatcggagaaaaccggcggaacgtcagtgcgaggatcgagcctgccgttggcgacgtcagacgcacgaagaatgccgcccgggtagggcttcggagccggaggaactgagacggtgtagggtgccatggtatgcgagagagatgaggcgggggttggtggtgcaagtgaaggcaagggtcgccctgccggctcaagtagctcgaagctggcggtccctgcgcgcgctttgctcggcgaaatgccgcgtggcgccagcagggacgcctttcctgccttagccggtccgcctaagaacattttgaaaggtcatgagagagaggccaatggcgccgcgggtcgtgtactcaggttgagatgtagcgagagagagagagatgagttgcacaagcgagaagagagaggtgggctggtctggatgctaagcgtcctccgcgttgacagcctcgaggcagcgcttctcgacctcctgctcgagtcggtcccattcggggtaccatgcgccgtaggcctcgtacgctgccatgtcaggctctgcgaccttgcgcgcgccggcgacgtcagactcttgcttgagatcggcccgaaggatcgacgagtagacaaagtcctcgtagctggtcgtcggctcggtcgacttggcgtgcgcccactgcagaggggtgaggaaggaaaatcggatcagcctgagatcattgcgcaggcgtgagcctgaggctgtactgactcctgctctgtatgcagcgccgacggcgcagccctgcgccgagccagtcgcgatgtacaccgggcagcctgcagatcaaggcaccatcgtcagtcgaaaggcatcgacgagagagagcgtcgaattgcacgcacccatgacgtcggccaggagcttggtgatggtcgggctgagagggacggcgtagagcagacgttggtcagcgcgacacctcaagctcgaccggagaaccggcctcacttgacactgccgccgccggcaacgaagatgcgccggagtacgccgccctccttgaggatgccggtgacgcgcttgcggaagctcatgaactggctctcgacgacgcgccgagcaaggctgctgcgctcttcggccgtcaggtcggcctcaccgccggcgaggtacgacccgtcgcggaagacgtgaacgccgctgacgcccgaggggaggatctcgggtttgtcgaaggagaagacggtcacttgatcgttggcgccggatgttggcgcagaggacgagtcgaacgaagcattgaacgagtcccaagagccgctgaagtgctcgtcgcggacccgctcgcgtgagagcgagccgttcttgtagcagagcctagagacaatggtgcaggattcttcgtcagccacagtgaagcggagagctcctggaaagggtgcacgtacattgccatgtagcgccgcttgcttccgggcgcatcgcccatcgggtggccgaaaacgtggtagtcggcgtcgggcaggtagtcattggacgcgagtaggacggtgtcggacgtgccgaggctgacaacggcgtcgccgctggattcaacgaggacagggggtcagaacgagcaagcgacaagcgaaaggggccggacgaacggggaaagagtgaacgagaggagcgtcgaggggttgtcgccggtgaacggagcgacgatgcactccggccggaaaccgtaacgctcagagaagtaggagccgatcttgcccatccgcggcgcgccggggtcgagctcaacgtcgcaaagcttaccagccagcgccgaggcctcgtcgggcgcggtaagggcgatgagctcgggcgagaacttgcggtccggaagactgagagagcggaaggcgcgctgttagtggcggagatgacagggaacacgactggaggcggcggacgcacgagtagaggttcatgccgcacgcgtcggcctggtagggtaggggaggtcgggtcgtcagtgacggcacaaattcacaagaagcggacgacgcacctcgtcatagggcttgatctcgccatcagcgcacaggatcgtcgcgagtgcattgctaacgagcgcaatcttgtccgtctcttcccagacgtcgccaacgccgcggttgacgagcttgcggatctgcgggcccgtaaagcgctcgtgggccttgctgccgctaagccggacgagctcgtcccggccaccagggagaccagcctcgagcgcggcacactcgcgcgtcgtcgacgagtcttgccaattggtgacggtcggcgaggcgaaagcgtccttgagctgcaatgcaagcggcgcggtgggcttgagcgagcgaaggagctcggaagcgcgggcgttgaagaggacgcaggcgtgttgctgaccggcgcccgagatcgagacgacccggctgaagtcgaacttgctgcattgcagcaagaaagggggaggggagcgttagccggacgggtcgacaaagggcgcgcagtcggctgccaaagtaagagagggacgcacgcctccttgagccgctccatcaagaggtcgatggcttggatgtacatctcgaccggcgcattcacgacacctccagctccgaggtggacgcccgacttcgtgccgaatgacggcagatccgacgagaagttaacgttggcctgctgggcgacctggagcgtcgcgtcgagggcgacaaccttgaggccctgggtcgagcagtctacagccgcggagtcgtcacagcgtcagcctacatccgctcaaatgatctgcagctgagggcaggcctgaccgaagccgagaaagaggtggtcggggagagacgaggtcgacatggcgagaacggagatcttggtcggctggcagaagctgccggggccgacatcctcggagcaggttagcatgcgtaagagtcgaaaggaagacgagcgcacgtcccgatagctcgcgtacgcgcacctttgttcgtctctggctggcaaaaagagagaggatggacgagagggatgagcgacctcggacgaggccgcgaggttacctcggtcgtaccgcgggctcgttagacggacgaaactctggcccgcccactgaccgtcacgtgtccgagactttctcgtggtctccccagcatgcttgcagacaagcagctcagggccatgatccacctgctgcaggatgttgacggcctgcagccggcaagagtagtgtcgaagaggcttggagagagagcggccttgatgcggggactccgctatactgaatctgcacttctgcattgatccctgcgccctgcatcaccccctgaacatcgcccgaccgaccagccgcctcttgcaccctctccttgaacctcgtccccttctttcaagccagttccctcgccacagcatacgatcaggctcaaaagctcgaaccttcttctcctgtaaagcccgcccgcggtctttccgaatccaccttccctcctcccttgactgctcgcaccctacgctcttcttcgctcgccgacccggatgtccgctccttacaagcgttcgtacgaggcctcgccggacgaccgcgccgaccagggcctgccctacggcgccgacgatgacgccccgccgccccgatcttccgctcgtggctcggccggcccgccgccaaagaaggactggcgctcggccttcctaggggacgagcagcttgcatcgcgcgatgtcgatccgcgcgaccgctatcaggcctcaggccgcgccacccgggcgcctcctcacccgagctcggccgaacggggctaccgcccaaggtcgcgaagccggagcagggagcgccaccgaccgcgcgaggacgagcgcgctgtccgaccgaggatgagcagggagcctgaagtcgaggaaggagagtgagtgttcttctactgcaccttcttgaacagacgtgtcatatcgggtcgacgcggcggaagggccatctctgctgcagagccacagtgcaggtgtgctcgcgtctctctctctcgcacatcgtccgacgcatcttctgcgctcctctctacgtcgttcaatcggactgagtcaacatcccgcttgctgcaggctccgcgacatccctcctgctcggcggccgcggacgcgctcgccgtctctgcctctcggccctcgcgcgggcgtccctccgccagcctcggcctaccaccgctcgcctcctctttcgactcatcccggcgaccggtacggcgacaggtccagcgatcgcaacggctacccgccgcgaggcaccgatggtccgtacgccgctggcggagggcgcggcagctggaacagtggtcgcggtggggctgcgccgtccttccgaggcggccgtagcagcggctacgagccctaccgcgctggtgcagttggccggccaccttacgacgaccgccgtagcgagccgccgtaccgctcggacggccgtgggccttcgcccccgcgaggcgacagtcgtgcgccggcgccagtaccattcaagccggccgagccgcctcagcaggtggtcgaagtcatcgaggccatcccggacgagatcgacgaggagcaggcgctcgccgagcgccggcgcaagcgggctgagatcctggagaagttctcgggccagagtagcgcgacgccctcgggcgctgcagcgacgccgcctcctctgtcagccgcggcgtttgcgctcggtctcggcagggagtcgacttcctcgcctgcacccgcgttatcgggcgcagtgagcgaagcccctccaccaacgccagcgctggcaacgacgccgctcggcgcattcgacctcgagaagcacgtggcttcggcgcccgacgcagtgttggcgactgagggaggcggccgcgatgcgcccctgccggtgtcgaccgaggctgagcaggccgtcgaggtttctgctgcggactacgacccgtctgctgacggccgggcagaggaggttcggaggatgcaggtcgctagcgagcaggtggcgccaggtgaacgaacggccgatatcgtccgccgggagacgaaagccgagatggcgcaggccggcgtgatcgtcaagacggatggcgtagccgaggctgaggaagaggatgacgacgacagcgacgacgacatgttcgctgtcgacgacgccaagcccaagaagccgaagaaggtcaaggcggatgtgccggtgcgtgcttctctgtcccccgcactctcgtcatgcacctgactgacgcggcgccccttcgtccgcttggcagatgatcacccgggttatgcctgccgtgccgcagtcggccgcgacgctctccgacaactttgacacggccgacggttactaccggattgtcctcggcgaggtcctcgacgacggccgctaccatgtcttctcgaacctcggcaaaggcatgttcagcgccgtcgtcaaggctcgggtcgtcaagcccgacccgcggacaggcgaggtcgtcggccaggaggtcgccatcaagatcatccggtcgcaggagtcgatgtgcgtggcgctctcctcttctgctcgacgggattttcgttgatgccctcctttttttgcaggtacaaagccggcttaaaggagatccagatcctcaacaagctgcgagagcacgacctcgatgacaagaagcacattgtcaagctcgagcggacgttcgagcaccgaggccacctgtgcatggtctttgagtcgctctcgttcgtcccgttcgcctctctttcctgagccctcaggacgacgctgacgctagcgactgccgctcgcaggatgaacctccgcgacgtcatcaagcgtttcggcaaggacctcggcctcaacctgaaggccgtccgcgcctactcgcaccagatgttcctcgcgctctcgctcatgaaaaagtgctcgatcatgcacgccgacatcaagcccgacaacatcctcgtgcgtcgcacccagcagcaacaggatgccgcctgacgtttctgactgacgcttgctcgcgctcgccgtccgcctcgaaggtgaccgagaacaagtcggtcctcaaaatttgcgacctcggctcggcctcgcacgagtcagagagcgagatcacgccttacctcgtctcgcgcttctaccgtgctccagagattagtgcgtctgccggcggtcagaatgcgcgcgacccgagagctgaacacgaaattgccctctctcgcagtcctcggcctgccgtacgactgctcactcgacgtctggtcgatcggctgcacgctctacgagctctacactggcaagattctcttccccggccggaccaacaaccagatgctgcttcacatgatggagctccggggcaaggtcaaccaccgcatgatcaagaaggcccaattcggcaacgtccattttgacgaagggcttaactttctctcgtgcgagatcgacaagtcgaccggcctggttcgtccctcgtgcgcccttcaagtcgctgcgcccaatcgactgacctcgagtggggtgtatgcgcgttctttttgcagaactcgatcaaggtcatgccgatgtcgaagccggtgcgcgacctgcgggcccgcctgctaccgtcggccatcgtccagtcgcggatgcgtgacgacgaactcaagtttctgctgtcgttcgtcgacctgctcgacaagtgcctccagctcgacccagccaagcgcatcacgcccaaagaggcgctccaacacccgttcctccgcgccggcgccgcctagacccttgctgcaggcctgtcgcagagtggttcgcggttgagcagggaggaagagaggggagaagctatgaacgagtttcgacccctccctttccgcttgcgttcgggcctcgtcgtgcagggaccgacccacaattgctgacggctgccgcccagctgacctctctccctgtcggtaagccgagtctcactttcacccgcatcctaccttgtacgagttctgccaggccctccctcgctgttgacggtgcagccaggcacggcgtggcgcgcagacgcgacgacgcgccggcggcgtgccttggtcgaccagagccaaaattgacctctctctcgtcctcagcaccgagctcagccctccacgacccgcttggcctacctccttgagcccgacaccagagcaagacgcaaggcataacgaggagcctgtgtcaagaaggtgcgtctctcgtccatccccttgcgcatgcgccccgacagagactggaccttgacgctctctcctctcctctcctccacctgcgacagctcgcctcgcccttcagcccgccagctcgcctcgtcccttgttccttcgcccctcgacctcccctctccagttcacaatcgatgctcggccgcaagctcccccctcctcagtctcggcgcgtcctgccatcgcgcgcatcacgcctcggcacgtcgtactgtgtgccgccgtcgtcggacgaccaatgggagcctggccctggtcgctccccctctcggtctgcctctggcgacgagggcccgtctgtggtcgggcgccccgtccatggttcggcaaagatacgtgacgactcgcgccgccgcccggacgtcgaagctttggctgcagacggccttgcaccggccgactcatcggcagctcggctcggccgcccccgtgccgggtcgtcaccgcctcatccagagcagcctctctcgaagtcgcgggtgcggtcatcgacgctctcgagcccgagcatcactcctccgccacgcgcagtggtccagcgcgagccggccgcgctccctggcggccgaggcagcactttcgacggcagcagaatcaagccaaaggtcagcaaggtcaccgtcacggccggtcacaaggtgtaccagtgctccggctacggcgactgctcgctcgtcttcacccgcgcagagcatctcgcacggcacattcggtgagtcgcgacgacgcgtgtctcctgagacgggctggctgacgctggcgcttgcttgcgctctccccgactagcgcgcacacgggcgccaagccgtttgcctgccactgctcaaagacgttctcgcggctcgacaacctccggtcgcactgcgtaaaggcacacccgctcaacaaggcgctcaacgagtcgacgatcacgaccctccgccagcagcacactgcgctcgccagcggctcggcgagcgagctccagaagtacgccaaggtcgccgacgagtcgctcggcatcaagctgcggccaaagactgttccgcggctggcccctgactcggcgtcctcggagggcgagagcgagcagtcgatcaaggatgctcatgagccggtcgccgggccgtcctcgtcgcgggccaagcgcaagcaagtcgacccgtcagacgaggattggtcgagccagggggtacggccggcactgaagaagacccggcgcacgtggccaaagccgcggcttgccttctcgccttctctcggccccggcatcagcgttcgccgggatagctctcgtggtccaccgtcggcagcgccgccgaagccgctggcggcctcgcgcttcaagtctgtccggcgggcgaaccttgcgacgtcaaacgtccgcagcccctttacccctgagatcgcgtcgcccgctacgcccatcgatggccgcccgagccatctcgttaaggtccgtcacgacttcaattggtcctcgcagctcatcctgatgcccctgtcaccctttccgcttcgtcctgcgactcagattgcctggtcgcgcgacagcggagatgctgcagactcgccctactcggcgccccgtcgcttttcgcggcccttctttgacgacaaggacgacgcccagctgccgctccggctcaagagctcgatggctcgtaaggagcccgcgcgcctgtcgctgagcaacgacaagcacttctcccgccggcactttgacgagatgaagtacgacgacgcatcgaccgcgtcggctgaggctgggcctctgccgctcaagcggtcggctctcgcctcacacaagcgcacggacggaccgaatcctctgctgccagcgcccgttctcgccaatggctcatcttcccggccaaaagtcgccgcggcggctggtgctcgccgtccgcagcaagggcaggctcatctgcgaccccctccggcgccggctccaacgacgagtcgacccgggcacgccacccactaccagacgtaccaagctgctccggctcgccgctacaccctgccacctcaggtaagcgccaaacggcacgccctgagcggctggggcgacggcccgtacacggccgactactcgctgtcttcggctcggacccggatgtcgtctggcgtctcgcacaaccgggcttcgagcggcgcgggcgctactctcggcctcggctcgttcggctacgctgccgcgccgctctggtcgatgagggccggcgcatcgcgagaagaagcgtggccttacgggccgccgcttgcgcccacgcctggccggacggtccactcgcccgagaagccaacgtcggcgccccgggcccgcccaacgtccgagtggaacaacagtcagagcgccttgatggatgttgcggtcgagatgttgcgccctcggccgctgccgccgcctcggccggtccctgtccaggtcgagcgctcaccctcagcggagatcggcgtcctttggggcgacccatcgcaggtcggcccggccgagactgactgcccgtcggcatggtctcggcacggcggccgcaacgacgcaagctttgttcaggtcccagcagtacttccgatgccgcaacacgtccggcggtacgagtcggccttctcgccaccgccaccgccgactccggcctactggcttgcgccctatcacccagccgcctatactgccgggccgtacgcctggcatcatcatcacccgatgcacgcgccgccaccctttgcccatttctacgcgccgccggtcgtcgactatggtccgccgcccccaccggccgactaccagtatctttccgacggccggccggcctttagcggaggtccgatgctctcggctttgtctccgcacggcctcattgggacgccgccggccacgacggcagacttcggctcgtacgacggtcatgcttacgccagcggtccctcgtcgttccacccgcaccggatgatgccgaccgcgcaagatgccgagcgggtcgagccgactggcgcccaaggcttccagtctaccttcgcccgggccctcgacgggcgagacccgcaggttgagtcggcggtcgtcagcccagctttcgcggaccatctcggcccgccgacgccctgcatgcgcctcccgaccctctcacccccggctggctcagagacgtcgccgaacttgacctctgcgagcgtctttgcgaagcgggtggccagtctccgcatcgagatcccctcggcgccctctcttggcagcggcgggccaacgtcggcggcggccgaccccttctcggctatgcaggactcgtacctcgtcaatactggcgacggccccggcccagactgcggcccgtcggcctgagccgtctgcctctccacgtaccacacccctcgcggtccgtcatctttccctccagctagcatcctcccttggtaaaacgttcgacctttcctctcttagttttgcaacggatagtcaacccactctatgcccctaacacgcagcctctgcattcaccggtcctactttctccacgcatcagaacgagcgccacactctcctctctgcacccaccccgccagcgcctttgccatgccgatcgccgtcgctgctgatgtcaatcgaaaggctgggctcctttgtgtcaagtcggcatgcgtcataacggccgcaggccgtagtcggccaagctctcgggcgggacactgtttggcgagcggaagacgtggtcgacgccggacgggttctttggaaacgcaatgacgtcgcggatcgtcggtgcgtcgcagaggatggccaccagccggtcgaagcctgcagagcggaggatgagggggctcgaggtcagtgccgatcggctgccgtctattggcgttgatacgacgcaccgatggcgagtcctccgtggggcggggcgccgaaagacagagcttgaagcaggtgcgagaagcggccgagctcctcgggcgtcaactgagagggtacccctgtcagtactgcgttgccgaaacaggtcagcacgatcgacgcaccttcagcacgtccgtcatgacccactcctgaagccggccgtcgtggatcctgacgctaccgcccccgacctcctgaccgttgaggacgaggtcgtagtgctgacctcggacgctctggatgtcgcccgccttcaaccggttgagatcctcaaagactggcgccgtaaaggggtggtgggtggccgaccagcggccgtgcgcctggaaatccttgtccgggtcggcctttgtgaagagagggaaaccgatgacccaaaggaagtgcggatccgggtggtaggtcgcgaggcctaaggagggagaggttcgtcagtcgacaggctcctcgtcaaagataatccgccaaagactaaccccgagcaacggcatcggccatcaagctgagccggatcctgccgaggtcggtcccgccgccttcgggttgagcagtgcgcttgccgatccagacgacgcgtccgtctgtaagaccaagctcgcgcgcgagacttccgtcctcagcaatattgaggccaggcgcgactcttgattcgcccgactggccgacgacgaggcgctctgcttgagccgcgacgtacgcagcgtccccgtcgatgccgacctcgacccaatcgaccggctggacgagaacgtcgatcgtctccttcgtctgctcaagctgggcccgcaggtttaccggcagcagctcgacgatgttctgaagctagattggttggtcgagcgtcagcaaggcgccaggaaggaaagcattcgagggcaagcgcacctggaggccgaatcgcaagtcgggcttgtcactgccatagagcgccatcgcctggctgtactgcatgaccgggaactcgccctgctcgccgaggacgccgtcgatgccctggatatgtttccagatgcgggccatcagaccctcgacgacccggcggatctcgaggccgcccatgctccaagggccggcggaggtctcggccgctgcccccgagacgaagcccatctccatgtcgacctgggtgaactcgggctggcggtccttgcgcgatccctcgtcgcggaagcaacgggcgatttggaagtagcgctcggtcaggccggaggcaatcagcagctgcttgggttgctgcggcgactgcgggagggcatagaattgcggctggccgacaggcttggccggcttagtccctgcggcagcgtcaggatccgaagcggcgtacgagtagagcaggtttctcgaagggacgaggaactctcgcgcgccctccggagacgactggagcaggatcggcgtctcgacctccatgaagtctagccggtcaaacaggcggttgccagagttagtcgcaggtcagaaggaaagacagcatgccaaagactgaccttgctcgtgaaagtaggagcggatcgtgtgcgcgacccttgaccgcttgcgaatgttgtccgctaaactcttgcgtcgaaggtcgaagaagcggtactgcgcgcggtactcctctggcggctgagccgcaggagattggacaagcgcaggcgaacgtcagtccggcgagcctgcagtcatcgggaagtatgcaggacgacgcaccagaaagtccgggtgatcgttcggcttgaatggcagctctgatcgtgcggcattgagcagccgccactcctgtacgtcgacctcgacctcaacgggtgtgtcgcgtgcgcggctgtcgctggccgcctcgggcgcgcccttcgccttttttgcgaccgcctttgctctcacgattccgcggacccagatgaccgactcgagcggcacgtcgagcaacttggtcgagtctacacccgcacgatggacgagctgcagctgggcgctcgtcgacgagagcagcatatggaagctgagcttggggctcgctcgcctgcaagggaagggaagagcagccgaagggccaggtcagctccgtggccgccggtagctggccacgtagagagcgcttcgcggaccggtggacgatgacccagccgccgaggatgacttcctggccgatcaagctcgcgtcaacctgctcaaaggtgtgcgttcgcgccggaagcgggcctgacgacggaggtatctgctcagctctactcgggcgctttggcgacccataagacgcaccagaatgcagctcgagacctgctggcaggctctgcgacggttggaagggccggatgacgtccgacaacggtgcgctgaccggctggggtgtcggcgcgagcggcgagctcgacgagtgcagcctctttagcggggcgacgcccgcggcccatctcggaggcgtttcgagcacgcgccggaagagaggccggccgctggcgagacggaggcgctgcaagtgggacgaggacattcaaagatggcggtcaaggagttggcaggtgctcgattcagccggtcggaacctcttgcagcggcggtgagcggcgccgaaaggtgggatggcgaagccggcctgcttgcttctgccgtccttccatcatctatacctcaagtcttgactgccatagacctcaatagaactagatcagtctcagaaactccatgctcgacattgaaggggtgaggctggctcggatctgtcgtggccgaggcgtcgccctgtcctgggacacctcggccgcgccaacccgtctgctcctggcttcggcttcggcctcgctgaccctgcaatctctatcggcctcgatcagttccggaaagccggctatgtgtgttctgctcgtctgtgccgccagccgttttgctcgggcagacgggatcgcgaactcgtcagagggctgactcttggtgctcgctgcggatctcgccctcgcgaccgactgacaggctgccatcgatgccgtctgcgactactatgccagcctcgagcagcgcgacgtcgtgtcctcagttgagccaggctacctcgagcgagagcacatcaccagtgcgtcgcgtgtctcgtccggccgttcaaagggacgctacactgattcggagttgcgcgacccggcgtctcgacagccgactcgcccccggtcgacggcgagagctgggacgtcatctcggccgacttcgaaaaggcgatcctgccgggcatcactcactggcagagtcccaagttctttgcctattttccggcaaatcagacgttcgaatcgtacgttcagacggggggaggtgccatgcgtcctcgtggtctgacctacgcacctcgcccttgcagcatcgtcgccgacatttatgcgagcgccgtctcgaacccgggcttcaactggtcatgctcgcccgcctgcaccgaactcgaaagcaaagtcgtcgactgggccggcaagatgctcggcctcaatgcaggggggttcctcggcagcacgggcgtcggcggggggtgcatcatggtcggtccgtctcctaagcaagccttaaacctaacctgacacctcatcggctcgccatacagggttctgccagcgaggcctgcctgacgatcgccatcggggctcgcgagcgtgcgctcctcaccctccatcagcaggcgctggcagccgcaggcctgcccccgaccgagctctccgagatccctcgcgacgtccgcgaacagtattcgcagaagttgatcatgtacggcagtactcaaactcactcgtgcgttcgacctacagctctcatcttctcgtctctaccactcggctgatgtgacttctgacccaccagcattggcgcaaaggccgcgtcgatccttggtcaccgcttccgtgccctcaaggtgacgaaggccgaacagatgtctctgaggggagaggtgctccgagaggcgatcgaagaggacgtcgccaagggtttcgtgcgtcgcgcgctggtcaggtggtctttgaccgcagtggttaactttgtctcctcgctctcgcgccagctgcccttcatggtgatcggcaccattggcacgacctcgtctggcgcaatcgaccacattgccgaactcggtgccgtcagtgagtgatcttatctagtaagtgctcgataaaagactctgacgacccctctttctgcacagtccgtgactacccgaccgcgcacttccatgtcgacgctgcttgggcgggcatgatgtacgcctgccctgagctgcgcgaaaagggccggctggccgaggtcaacgagtttgccggcagcttctcggtcaacccgcacaaaaatggtcttgtcggcttcgactgcaccggcacttggtatgtccgctgcttgcgaccgctcgcaagaatgtcggctgaccctgcgactatcacttctccatcgctcgccgcagggtgaaagaccggaccttcctcacgaatgcgctgtcgctcacgccagaggtcagtcgtgcgcagtgtcggggcggttggccgcttcgccatgctgatcagccgttgacgacccttgagcagtacctcaagacgaagcacggcgacacgggcgccgttatcgactaccgcagctggaacctctcgctcggccggcgcttccggtgcgaccgagctcgtgcacgttgcgtagactcagcgcctgatcactgactcgagcacacggttgctcccagttcgctcaagctctggtttgtcctccgttcgtacggcgtctcgggcttccaggcgcacatccggaacggtgtcgacctcgttgaccagctcgcagctgtaatcgaagccgacggcgactttgtactgccgacggcaccgtccttctcgctcctgacattccagctcgcgccggccgctgcctcagccgggcgagtcgacgcgctcaaccgacggctgcacgagcggctctcggccaggcgagatgtgcttctgacgcagacaattctgcccgaggttggcttttgcatccgcctcgccgtcgggacgccctcgacccgctgggtgcacgtcgagcaggtctgggctgccgtccgtgaggaggccgacgccgttctcgacgaggagatctgatcgatgcctccagatttgcaggagaacgaagagccatagaaacggctaggcacgacgtgcgcgagaccaaagcatattgaaaggggacggagggcagcaaagggcgatacagtgtgcttggggcgatacaaaggaggtgtagggtagggggaggtcgagtagtgactgacacctctacacggaggggcgaggcagcgagatcaggcaaagaggagggtgaagaggagcgcggcaatggagaggctaacatcgttcgctgatgcacgagagcgttgtcgcaaatggagaggtgagtccggccgtcgagccaatgagcaggaaaggaggaggggaccctagaagcgtcacacgccttaacgcttggccttgcccggcttgcccttgttcttccagcagtcagggatcgtcttctggtggcgaatgagggcatccttgcgagagaagggcttatcgcaccgttcgcaccagaagccgacggccgcgcctgcgctgccggccggcttgcctgcgccgtctgacgtccgtgccgagccaggggcgttggtcgacgccggcggcatcgagtggaccgtctcctcgtgtcgcttcaaatcgtagaagcggacaaacgaggccgagcagggcttcttggtagcggggtcaactgaggtgcaaagaagggcacgagaagagggactcagcatccaggggttgctgctgctgcggcagtggtttctagacgcaccgtaagggcagtaggtgatctccccgctcggactagcccggcctgagctgcttgcactagtgctcgcgttccggatcttgctgacgccgcggctcatgacgctcgccctgggcgccttggccttcagcttggagctgccgcggaccgctcggccgaggccgaccccggtcggagccttgccaccgcgggcgcctcgccgagcggctccacctcgaccgggcatgccgagcgcggctcgtcgtgcgagcaccgctgacgacagcgggcggcccttgccggtgtatggcgcgtcgccaacgaggtcgtccgagtcgtccgacgaagtcggcaggccgtcaacgtcgatgtcgatgtcgattgcgccgctgtcgtcgtcggcgtacgagtcggccgtcgtcgaccggggggagccaccgccgccctcagtcgcccgagtctcatcatcgtcgtcgtcgtcgtcgtacggcggctgatgatggctttgcgtcggaaagacaccgcccccgggggctgtcttaccgagccctggtcccggcgctcgtgacgacagcccgccgtcgtccatctcggcgaccgtcctcgatgagggagcgaccgatccgcccgtcccctcctcggacgccctgaagcggtcgacacccgagagcggcctgaaaccaaagtcgacctttgtgagctcgcggccgaggccggcgccttcgctcatcgctgggctcgcctgctgggcgacggcggccgcgccatgcggatagccaaagtagtgcatcgagctcgcgtgcggcgccgacgtcgacggccgaggctggggctcgggcaggatgatgggtgatggcacctcgtcctcctcctcggacgaggtcgacaggtacgagtcggcagaccggagcgtgtgcagcggagcaaagatggcccggggcgaggtcgtgttggtcgagtcgaccgagaggggcgagtggaagacgtgattccggccctggaggtgggctggcaggtggtgctgcgacgaggacgaagagggtccggcggcgaggtggtcccttgccgggtccatcgtccctcctcgactggcgcccaagccggtactgctgctgccggccgctgcaccgctcgtcgaggccgggccgtttccgccggcgcggccaaagagcgaggggtacgtcttcttcatgatgcggtcatcgccaaagacgtcacgcgggctcacggtcgtgctcgcgtccgagaaggtcgggctctgatgaagaccatgctgggcggccggcgagcgataggcgttgaggtttgcggtgccgctgttgggcaggccgctctggctgtgaaaggggtgatgggccgaggtcgaggcaaacagcgagccttggccggaggaggagaacgtgaatggatgcggcgtccagctcggccctgctgatggcggatgagggtaggcatgagggtaggggttcagaggttgggagtctgcgggcagaggcccttgcggtctggagatcgggaagtaccagggggtcagcaatctggtcggacgggagcatcaccccaaacttagctctcttgtcacccctcctctagctcttctgagccgcgaccagtgcagcccgtcgcaggcgccaagctgcgtagcctcagagtgctgccccggggccggaagctcgagccggacgagtcaccgcgcgcggtcgacgtcttgagcgtctagctccggctgccttgtccccccccccttcgctctcaactcctcccgcctgccagaagacaagtagccgcttgtcctcgagatactgtcgatgctcgatgaggacctcgtcgtgaggatggaggacggccaggccttgaagctgactaaggcctgatgccccgagcacaggagggcccggccgagatcggcctgcgcgaaagcaagccctggatggcggacgaacgggcagacagaccgatgcgagcgagaggtacgtacgatcgctgttgctgctgctgctgctgttgtcctccggcagtcgagccgctagaaggcggcggtgcgaggtcgaccgcctcgccctcgtcgtccgactcggcgccaaagacatagtcgtcggcggccgactggctgaagacgggcgtcggcggcgggtgctggtacggcgtcggcgcggtcgacatggtgctctctctgaaaagagcgatttcgtttctagcaaggaaaggagggtccaaggaggtcgaggtctacaggcggggcgatggtcgcaggcgacggaggccgtgccgaaccgaagccgcgtcacctccgatcgagttcccccgactcgagcgcgcagggccaatctggggtccagttgtacctcgcgccgagggtgcactcgcaagaccgtccctttccggcttgcgagccgataacgcgcgataggtaacagaggcatcgatacagcagcagacttggcgggggtcagacggccgagaccggcacgcaccttgtcgcgctgcttgagcgggagcgaccgcttgtcagcaaggcgcaggccgcggtcgacggcgaccctgagcatgatcttcgagtacaggaagtgctggcggcgaggagaaggatttgggttcagctcgcggagagacagaatttcaaagcgggaggaagcaccttctgctggttgcggacctcccagatcgagaaatcgggctgcttccagttggcgcagacgtagtcgaccactgtggccaaaatgtcagccgaatgtccctctgactttgaagaagacccgaggacgaacgtgattggacggcgagccacagtcccaacttaacagtttgctgaactctggggagaaaggtgaagcgtcaggagcagggctcgagatggttgagcggcaagacgtactctgagccaggtagatcgagtccatgagctcgccgtagatgtcgagctggagatggtcgacggcaccgttgccgatccggaccggcttcgagtccttgtggccggcgaggtgggcgagctcctcctcgggcgcctccttgccgccatggatggtgtacatgatctggagcgagccgtccgagttgcgctcaaacagccgctgctggatgaactccatgaacgcgttggcctcggccgtgtagcccaaccggatcagcgcatagagcgtgaacgaagagtcgcggatccaagtaaaccggtagtcccagttgcgggtgccgccaatgtgctcggggagcgagaaggttggggcggcgatgatggcgcccgtctcctcgtagacgagcatcttgagcgtgagcgcctgccggtggacggcctcgcgccagcggcccttgtaactaagaaaggagcgcgtcaggtccggacgacaagctgtcgtgacgcgcacgctgaagagataacaagttgtcgtgacgcacgtgcatttcgaaattcacttgagccagtacgtgttggtctgctcgatgagcgactcgacgagcttggcgctcaggatcgggtcctcgtccgatcggatcttggagacgcccttggcgagcgtcgagaggtcgacgccgagctgctcggccatctctttggttgcctcggtcgcccgcttggcagccgaccgcttgaagccgtccttaagacggatgcgaagagcaagacacctcgactcgcgcgcgcctcagccaggcgagctgccttcctcgattagcgaatcggggcagtcggcaaagggtcatcaacgatcgtttcttctcactcgcccgctcctttcgaactacaccgagatggtccgccaaacgttgaagccgcctccgccagtcgagcagagcgcgccggggatctgcgggaggaaagcgacctccttgcagtcctcctggtggtgctcaaaaagcagctggggcgggacgtcgacctcgccgccctgcccagtctgctgggccgcctcatcgtcgtcctgctcgaccgaaagatcccaaagggtgacggttccctcggcggcggcagcagaaaagatggacgactcggtcgggtgccaagagacggacgttatcggcgacgtgtgccagtcaaagttggcgaccggcgttggcttaggcccgttgccgctgcagaatggaaggggatgtcagtcgacgcctctagcaggaggaggagcgcaggccaagggagggagacgcacgccttgaaattgcgcaggtcccagaccttgatggcgccctcgtcgccgccgctgacgagcaggtattcggccccggccttgttccacgaaatgacgttgacgtcctggtcgtgagcgccctcgacgccgacggcgtgcttgcgccccttctgcctgacgtcccagaccttgagcgaccggtcggccgagcacgaggcaaagaccgtccgctccgagggcgaccactggaggtcctcgaccgaggacgtgtgcgaggcaaaggcgttgggcgaggtgacaaagcctgactcagtcgacgtcgtcaggtagatctttgaggcgacgtcgcccgagagcagtcggagaccctcgcccggtccgccgccggcccagtcgagcgcgtagccctcgttccgaccgtggttggcaaccgtgtagaccggtcggttgacgacgtcgcggtcaatgacgtagccagggacgtcgagcgactcgatcaacggccggacgtcccagaggtggaccttgcccgtctcggaaaaggtcgccgtgtggtacggcacgttgacggctgggagggccgacgacgacggctggggctgggcccggacccggttgacggtgccgacgtgcgggatcgagcggtactcaaggtaggcgtcatcgtcgacgtctgagtcggcatccgacccggcgtccgagaggtctaagggcgggcgggcaggcgggcatgtcagcacggagacaggcgctcacgcctcacaggacgcaccgtcgtcgaattgcgttcggtgcatgccgcccatcttcatcacaaggacctcgttggcgttggccgtgtcggcctgggtgccggacgcgacgtaggccgtgtgggggaacttgcggcgctcgtcgccgagcgagtcctgcgtcgagtgaaggtgagcgaggagaggtcagcgtcgctcgctccgttgacacccggtctggcgcggcagagcccctcctcaagagcgaacgaagagggaacgcacccggagaacgtcaaacgagagacacggccactggacgttcatccggtggagcatctcgtagacgctctggtcgggctcgagcacctcgccctcctccagcgggcgcgacgaccgggcgaggtacgtctcgggctcaacctcggcctcgtcctcatcctctggcggctggtcgacgtgcatgcctgcgacgaccaggaaggtggggagagcgtcagtgccggcgtcgttcgaagggaagccgacatggtgagctcgtcatccgtgcgttgagagaagggacgagctcgaccaattgccaggaaaggtttgtaaggggacgcacgctcctcgtcgccgtcaaagtcggacgattcggcctcagagacgacctcgtcgccctcgctctcgcctccgtcgtcctcgacgccctcgagctcgcccatgccgccgtcgtcgaccgtcgtcgttgttgctgccgtccgcgacgctgggttggcgccagtaccgacagcgggcgccttggctgccggcagctcgagcgggccgggagaggagcggcgctttccagtctttcccatggcagtgctagtagataggtgggtaggatgggtgggttggtagagggcagcgacgacggctcctgcccggcgaggccgaatcctccctcctcgtctcgctcttgctgcgccgacctgcgcccgcccgcgcgcccaagttttcgagatttcgggggcccgcgcgcgagcgagggcgagagcgagcgagagccgacggagaagggacgagcgagagtgagcgttgctctcggtcgaccaccatcccttctctcttcagcaatgacgacccccgaacccctcaggtatgtagcgcacgtatgcagaggctgcacggcagcgggacggtggtgcgacgttgagctgcttgcttctcgcagccctcgttcagccgcccgaccctctctcccctctcgagtcatagccgacctcatcctaacccgtcttcctcgcctccgccagaattctgctccttggcgccggcggccgggagcacgccctctcgtggaagctcgcccagagctcgcgggtcgacaaggtctttgtcgcccctggcaacggcggcaccgcgagctcggccaaggtcgagaatgttgccgtcccttacggcaaggactttggagacatcctcgcgtgggctaaggagaaccgggtgcgtgcgctgtctttgacaaaagccggctggcgtgagctgctccgcaataaaaatgtcatgtcgagctgacctggagaattccttgctgcctgcgcgtgcacgcctcggcttccgtcgctccgctccgcttccgccagatcaacttctgcgtgcccggtcctgagcagccgctcgtcgatggcgtcgagggtttctttcgccgcggttagtcttgtgatgagactccttccgaccggcggctcactgacccggacttgctcccttctcgccgccccctcccagccggtatcccgacgtttggcccaacggcgctcgccgctcagatggagggctccaaggccttctccaaggacttcatggctcggcacaacatcccgacggccgcctacaagacgtttacttcggccgagtacgaccaggcggtcgcgtacgccaagtcgtgcgagcgcgtcgtcctcaaggcgagcgggctcgcctcgggcaagggcgtcctcatccccgagacgtgggccgagaccgagcagggcctcaaggacgtcctcgtcgaccgggtctttggcgacgctggtgcgtcaatcaccccgtgcggctgctcattcgggaagctcatccctctaccccttttcttctctccccaggtgacgaggtcgtcattgaggagttcatgaccggccctgagctctcaatcctcgccttctcggacggctacacgatccgctgcctccccggcgcgcaggaccacaagcggatcggcgacggcgaccaggggccgaacacgggcggcatgggcgcctacgcgccggcgccagtcgcgacggccgaggtcctcgccgagatccagacgcagctcgagcagacgatcagcggcatgcgcaaggacggcttcccgttcgtcggcctcctcttcaccggctttatgctgacgccgaacggcgtcaaggtcctcgagtacaacgtccgcttcggcgaccccgagaccgaggccctcatgctccttctttccgagtcgaccgacctcgccgagattatgctcgcgtgcgttgagcgccggctcgactcggtcgagctcgcctaccgcgaaggctatgccgtctcggtcgtcctcgcctcgggcggctacccggcaaagtacgcgaccgccctgccgatctcgatcggcgagatgccggccgacgtcgtcgccttccacgccggcacggccgacaaggacggccagaccgtcaccgccggaggccgcgtccttgccgtcgccgctttcggcaagacgctccgcgccgccgtcgacagcgcctatgctggcgtgaagcagattacgttcgagggcatgaccttccggaccgacatcgcgtaccggtacggctccctctttcctcctctcgctctcaagagcaagtcgctgatcggccccttcatgtttagcgcctttgccgcggccgacagccaggccaagtccggcgggctgacgtacgcctcggctggcgtcgacgtcgacgccggcaacgcgctcgtcgaggctatcaagccggcggtcaaggcgacgcgccgggcgggcgccgacggcgtcattggcggtttcggcggcgcctttgacctcaagcaggctggcttccgggacccggtcctcgtctcgggcaccgacggcgtcggcaccaagctcaaggtcgcgctcgactgcaacattcatgacacggtcggcatcgacctcgttgccatgtcagtcaacgacctgatcgtccagggcgccgagcccctctacttcctcgactatttcgcgtgctcgaagctcgaggtcgagacggcggcgaccgtcgtcaagggcattgccgccggctgcctcgacgccggctgcgccctcatcggcggcgagacggccgagatgcccggcatgtactctggcgacgactatgaccttgccggctttgccgtcggcgcggtcgagcgcgaactcatgctcccaacggccgacattgggcccggcgacgtcctgctcggcctgccctcatcgggcgtccactccaacggcttctcgctcgtccgcaaggtctgcgcccggtccggcctgacgtacgagtcgccctgcccatggtcggccggccagaagctcggcgagaacctcctgacgccgacgaccatctacatccggcagctcctgccgggcatccgcgagggcctcttcaagggcatgagccacatcaccggcggcggctttaccgaaaacatcccgcgcgtcctgcccaagggcaccggctgcaccgtcgatgcaagcgcctggccgctcccgcccgtcttcaagtggctcgcgaccgtcggccagattgcgccgctcgagatggcccggacgttcaacaacggcatcggtatggtcatcattgttgccgaggcaaaggccgaggcggcgatggcctcgatcaaggccgccgggtccgacgtctttgtcgtcggcaaggtgactgacagcgagggcgtccagatgctcaacatggaggcctggacgagctaggctgcctctcctttccttctctctcttcctctctctagatctgggccggtgccctttctgtcgccctgcccaccacaaaaacgttgtcaaacacccccccccggtctctccccctctaagttgtgtctctcatatgttttatctccctttgcccagaacgactgcgacggtcggaaaaagagcagagacaaagggccatcgtccacgccctcgcgacctcctttactcgaggtccatgccctcggcctcgacgccgtcggcaatctcggagattgagccgacgcggtgaggcgttgcgaacttggggaacatgcgcttgtacctgcggcggcgaaaagtgaacgtcagcgctctaggtcgcgggcgacctcaagaaggcaaagggggggagggacgcacagcgacatgcagacaacgtcaagcgccttaagcggcttgtcgaagtgcgctttgaattggccgtgcgtgccgagcggctcggaaatgtggccgacggcaccccacttggtgacgagctggaccggggcaaagtagcggactgagcgagaggagtgcaagcaagcacatcgtcagcagtgaggcctcgcttgtcaaagagaaagagaaggaaggaaccgcaccgtcgtcggcgttgaagaacataagcgagacggtgaccgtcttcttatgaatcttgaccgggtggcccgtcaaaaggatccgctttgcgttgatgcgcgtcgtgtcggcgttgaagaagctgccggaagcgacgagcgccggcgcctgctcgtcatcctcgtcctcgcggagaagcaagcaaggctgcttgccaaaaacgatcgggccgtagatcgtcgcgacggtcgcagcgccgtgccggaggtagcgctcgctcttgtggacgttgtttgcgcccttgccgccgccgcggacgtgctgcgagtagatcgggttgacgcggtaccgtctcgggccgacgcagaggacgaggctgtccttgctcttaacgggctcggcgtactcggtgtttcgctggacgacaaagttgaggaccgactgcttgtgctcgtgctcaaagaggccaaacaggaagaaaggcgcggacgggtcgagcgcctcaaacatggcccgcgggacgtccttgatgtggacctcgacgtgcgtgccgacctagcgaacgggggacaaggtcggccatccgagccctgcatgagaaaagggaaaaggggggaaacgcacctgaacaccctcctcctgggcctcgagcatcaccttcctcccggtcgtctcgtaattccggaagccaaagatctttgcgtagtcgaccggcaggttctcgtacgggtcccacgggctcgtccggaacgagcggaggccgcggaagcgctggaagcggactgaggctgggatgtgcatcggcgtgtcgatctcgtcagggaactggcggtcgtccgtctcgtccgactcgcgcgagcgcttgtaggctgcaaggctggaaaggaggcgagcacaagggaaggtttagtcttgcgacgcgttacgagcaaacggagcgagaaggacgcaccgagcctgctcctcagcctcgtctcggtcggtaaagcgcacgctggccgtgtcgcccccgcgccggctctctacctcgacttgctcgtcgtcgtcccggccgtcgagcccgtccatcccatcaacgtcgtcgcgtgccgccagccgctcgtcgtcatcgtcgtccgacccgtcgtccatcgcactgtcgtcatcctcgtcgtcctcgtcttcctcctcatcgtccgacccgatccacgccgcctggtaagccgacgtccccttcgggaccttcctgatcgacctcggcgtcgtccccttcccagccgccggcaacctcggcgggcccatcagacccccttcctccccctccctcgcaccgccgccggccatctcctcctcggtaggccacgtctgctcgttggtcataaagtcgggctcgttgagcgcgtcgagcgtgtcggccgcgtcggggtcaaaggccgagaggacagaggcggacgaggtcgggtcggtcgacatggcgtcggcgtgcgtgcgtgccggagtggccgacgcgagcggggcggcaaggatctgcgaacaagaaggggggagggggattagcattccagggatggcagcagcaaagagaggtcagagcggaccttgtcgagctggaagtcgccgaggttcggcaggtggacgagccggttcgcactgagccgtccaccacggacgtagcctctcacgacgaccgaccccttctcgccgtcatcggcagtcgggacgaatgcgagcggcccctcttggacgacccacgcccggccctcgcgccagctaacggccttcggcgcaccctcgcacaaagcccggacgcagacagccgcgtcattcagggtcgaggtcgcgtagacgcgcgggaggtcggggaagaagtaggtgaggaaggagaggagggacttgagggtcgcttgcgggggcgaggttggggcccccttcttttccttcgcacgccctccttcgcccttcgtctcttgtcgcctcgcctccctcaccctccttcttcgccctttctctttgccttttgtcccgaccccctttcgtctgagcgatacaaccctcttctcctttgcttgcgatgtgccgtgcaagtcggtaaccctagcccggagcgatcgagcgaagccacgtcgccgtccgcctcgccctgcttgaccccttctcctgctcgccttcatcctccgacacctcaactttctttctccagaccccgactctcgcaccgacggctctccatcaccatgtcatcagactcgacaaagcagaacccgacgccgacggccgacgcctcgaaagccgcctccacgtcgaccgccggcgccgcggccgacaagaaggccgatgtccctcagctcggcgcgctcgaggaggacgacgagtttgaggagtttgccgagcagggtgcgtcccttccgctcgccggatgcgaagattgcttagaagcgggagagaggcgggaggctctgggtggcggcgagatgaggagctcgagctcgagcttgcgctactcccgcccacatcactcctgacgacagagcttgcaaaagatctgccaacttacattcatcttctcaccttctctctcacttactgcctgctctcgccgcgtctagactggagcgcatccgagacctcgcttgcccacctcgcctcgactaagtcgggcgcgacctcgtcggacacggcaccgacgacgacgagccacctctgggaggacaactgggacgacgacgacgtcgaggaggacttcagcaagcagcttcggtccgttctcatccttgtctcgcttttggccctccttgcggttcgcgggcaacggagttcagctgacgagcgctgatggaccgcggagggagtggtttcgagctgcgcccctgctcaacctggctgacccttcatcacccgccttttcacatccagggccgagctcgagaagaagaatggcgcggcggccatgtcgacctaggtctccagcctcaggtctccgagctcccgtcaactctcgcccgcccttcctccgactctatccaccccacgcccgcgcccgcatgtctgatcgaatgcgccagcttgtacgacactctcggccggcgtgtctgtggtcgcgctcggttcacgctcgcgtcggtcagcgcgcaggatggaaggtcgagtggacaacgattggtatacaggcaggcaagacaatgggctgacgggcatggggtgatggttgtacaaacaagcaacaaaggtggacgagacgagaagaccgacagagggacggagacgtgtataccaggggaacgttcaaatcagagcgtaaaggctaactcagggagggccgggcaagtcaggagggcgacggagggcttagcgcaggcggaggcaacgccggctgccctcagacgctgatgcgcagccatcgccgccgcctcctcccgacgctcgggcgttgacagcgctgaccttcgcgcgccggcgcttgttgatgaaccagtctgcaaaggagccggtccccctggtcagcctctgcgagcagctcgttgcggaacggagctggaaccgaccgtcgacctgggtgcgcgtcatgtcaaaggtcttgacccactcgctcttttcatcggccgtcgggtacgggttcgacttgtggctttcgtaccaagcctatcggcggcggtcggcgtcccttcgagttagcttattcctcgtcgagtagggctagtgtgagagggcgcgacttacagtgaaggcctcgacggcaggagcggagagggtcgacctgcgaggcgcaggcttgaccactggcttggggcgctttggccgtgctgagcgcggagagggcgacagcgatgctgtcaggggctcctcgtcgtcaagcttcacccgcttgctggcccaattcggccgcgctgacgggctggcgacggacgggccggcgacggcgttcgtctcaattactggcgacgacgcaagaatgtcgctctcggtccggtcgctgctccgcgagcgcatcggcttatccgacggcggacggcggcggggcggcgtaaagaggccagctcggacgatccacgcagccacattctcggccggcgaagtcgacagcgagcgtgacagcgacgtccggcggagggatcgctgcgcaaccgctggcgtggacgagtcggacgccgtgtcgagccgcagggcagacgtcggccggtcggtcgcaatcgggtcgccggtgctaccgagtcggctccagctccagcgccgaggcccagtctcaagggctcgtacgagccgatagctgtcggtggcctgagcgtggccgtcgccgctttcctgacttgtggaggatgagggcgcgccagcgccgttgatcgcagcactatcgaacacgtctcgctggaccgacgtcggtagcagatccgacgaaagcgaggatgaacgcgacctgcaatgaacgagagcagactcatcgtcagtgcgtattcgagggaaggccgatgcatggacatactctggctggtcttcgatccctgcgtccagaacctgtgccatcagatctgtgccgtctcctggcggtggcggcccgaaggcgacatgcgtctgaggcttcaactccatcttgggccgaccgagcgtcaagccaagcatgttctcggacacgtcaacctcggacgtcggcgtcggccagcacgtctcggtcggcaaaggcggaaatggccagtctccctcgtcggccgctagaaggacgcccggcggaggctcggccagcgcttctgagaaggcaggcgaaggcggcggccagagaggatcgggcttgatgtgccgaccggacggcgtctggagagctgacccggccgccggcgacgggttgagcggcgaaggcttgatcgtcggaagacacatgtcgtgcgtcggctgccgtcgggccggtgggggtagccagcggtcgtccttgtcgctggacgggtacgcgggcatgggcgggagcgttggcgccgagaggagcgtcgggccatctgacgataacggcaccgggacgaggttgacgagcccaggaacggcgggcggtccgcaggtcgacgaggacgcgtacgggtcgaaccaaagcggagccgagccgaaaggcttgcaggacgcaaacgccagtgagttgtatgcgctcgggagggcaaatgactcgatcggcggaaggaggacgggccgagggagacagccgtcgacgaggtgatgcgaccgatagagtaacggcagcgcgccggggtcggcgaggcttttgacgaggagtggcggcgacggcggcggagggcgcggttcgtgctcggcaaagagaacaaattcagattcgaggacgtgctcattctggaatgcgggcggcctgtgcaagcaaacgttgcgcgcaagtgaaggcggtcattacgcacgaacgtccgggacgtccgggcaaacggcggcaagggaggcctgcgcacctgctggcggctgcgaagaaggtgaggcgggcctgtggctcgagcacgctcatccgcacgtcgccgggcaagccaaggacagggatggatggaggcgagttgccggcgggtggcggactgctggtcgtcgtcgtcgtcgtcgtcgtcgtcgcggccgtcgttggcgtatgcggcggcaagggcccgttctcctggtccctcgcggcccagagccaggcgtggacggcgtcgtaccgcgcaaagtcggggcgggccatcgcgtcgtggagaggaagaggatgagcgtcggcagcgaagggagggacaacaggggcaagccctgtcgtcgtcgtctattgcgaagtcgctcgtgacccggcagcgacttccgccccgattcagcgaaagtccagtgccggaaacatcggaaacgccccttttccgctcgtctcgttcggatccgaatgtcgtcgcctgtatgcctgatgcgggctgctgttgcgatggagaaggtcaagatcgtcagcctgctagccggaccatctcagaggcagcggaaagggaaggccggggcgacattgcatctgaagaaggtcgtgatcgttagagtgagcggagcgaagggaacgggtgaggaagggtgtaaatcgaagagggagggaacgggcgagcgacggcgctaggacaaggaacgaaagggagggatcgacagctaaggagagggaaagatcagagagtcgggcgagaaaagtggagcgagccagccggctggctggccgttcctctcacgctgcccggcgccgcgcttcgagcgttgcgagcagctcgtcggccttgcgccgctcgcccggctcgacgcccacgccgtcaatcgtcctcgtccgcgggcaggcccgcatgacgagccctcggtgggcgagccggcgaacgtaccactcgtcgggcagcgcacggcggaaggcgccatcgagctcggcccagggcgcaccgccggtcgtggcaggcccggtatcctggctcggcggtgcggaagagccggggccggcactgagggccgtcgaggctgtcgagccgagctcggccggagacgcagccgagttcaggccttggacgatgagcggaaggtacatcgcgagtgtgaaggggttcatcctggtatcgggcgggggagcaaacattaagcggcgagcgggatggacgaaagggaggacgacgcaccggaggtcgagcatttcgagcgccggcagcgtctgtaggacccagacgacggaagccgaggcctcaagccgcgagccgacgacgctcagtttgcgcagccggcgaagattggcgagcgccgaaaggtcggcgaggtagttgtagttgaggttaaggctcttcagcgcgggcgcaaaggctgcgagaccggtgggcggcaggctcgtgagcttgcaggacgcgagctcgaggtaggccaggtccgggcacggctgggcaaagagcgagggcgagagggcgttgcccgaaaggaagagccgcttgacgtgcttgagctcgcggccagagatgacgaggctcgtgccggcctgcgagcgggcgctcagcgtctgcagccgggtcggcccgctggtcgggttaatcgtctcgagctcgttgccatcggcgtagagcgtccggagctgcggaaagtcacggatgtcaagccgcctgagctggttgcagttgagtttgagcgtctgaaggcccgtcagcggtgcggcgggctggaagtgacgcaggcggtttttgtctatcgacgagggagaaagtgatcagcgctcggctgagagagaagctgactcgagatcggggtactcaccgagcgtcaggctcgacagcgagtcgagctgctcgaggccaatgacgttcgtcagcttgttgccgctgagatcgagcgactgcagctggggcctgcagcggcgacgtagaaagagtcagcgaagagcaacacgtcgtatctttcaactaaaaccagaacgaaccattgcgccttggtcacgtcgagcgagacgatgccgttacccttcgcgctgaggctgacgagcttcgtcaggctaaagaggggcgagatgtcggtgaccgagtttgagtcgactataagttcagtcagacccttgagacactcgagctctgcaaaggtgacaagaagcggtcaacacaggaaggtcaacgcaagggggtttgagccgaagggcgcacggttcacggcctcgagctggttgaagccaatgttgaggaagcgcaggtttgagagatgcgcgacggctgtgagctcgctcagccgattgtgcgcggcatgaagcctctcgacggaagccggaaggccgctgaggtaagagaggtcgtttcggttcctttcgatgccggacgagtgcagggtcagcggcgtatccttatcgaacacgcgggcctgaaggacgcacaggttgacctccaccagcttgggaaggaactccttgagccgggcgacgctgcctgcgagccggccttcgagatcgagctcccggagctcctcccagtaggcaacgtaagggtggacgtcggtgatgatctcgacgagccggtcgcgtacgccgtcgaacgagcattcagtcaagaatgtcgcatcgccggggttgccgcgccggtcgccgtaatggaaggaccggccggcggcgacggaacggaccgttatgttgccggcaaacgtcgagtcctcggtctcgtcgtcgtactcggccgcctgggtcgtgactgccgccgcacggggcgggtctcgtggcttgtagtgtcggagcgacgagccgcccttggatggggtctgctcggcgaggcctgcgacgagagagcggagcagaccggtcagcgacggaggcaagagcaaccaacgcgattggcaagaacgcactagccatcgactcggtgacctcgtcgtcgccgagcccgtcaagcatgctctggatgcgcacggcacgagccgagggctggctgctccggtcggccgggtcgccgtctgccttgccacggcggcccccgccagcagccagcgagaactcgatccggtcgacctggaggtcaatcttgccggccttcttgccgtcagagaagctgacactgcgccggtggatcgttgagcccggcgtttcggcagcgctctcccggaagccgacgccgggcgagcgcttcttgagaaccgagacgggcgtgagacaaggccgtagccctccagtcgaagcgacgcgtgtccgctgctgcgtggccggcagcggcgtcgaggcgacagccggtagcggagccgagttgtggtgctggagcggcggcggctggaccttcggtggcggcgagagcgcgagcaactcggacggcgaagacgtgggaaattggaacgacttgagcgaggccgcgacctcgtccatgtcaaatccgtcgccaccgacgttcgagctgatggagatgctgcgctcgaagctccgggggaggctcagacttcggctcgcgtcgcgcgtgaagggcctcgacgagccgacctcctcgtgtgctgccggcggtgtcgtcgatgacgctcggagctgctcgatcaggttgccgccggcggctgcgcgaccgctcgtcgtcgtgctgttgaactcttgaaacgggtcgtcttcctcgctcgcgaggccgctgctgccaaagctgccgccgcgcgcgtgcccggccggccggaccttgacccactttgagcgctcgcggtcgaactcgagcttgccaacgcggagcggctctgagctcggttggaacgggatgttgttgagctttgcggacgccactccggccgaccggccgaccggcgggccgacgtgcttggtgtaggacgagacggtcgagatgccaaaagttgacggcggcggcccagttgacgacgaaacgtaacggtgcagatcagacgtctgacccgcatcagctgcaccagaagatggtgccggcggaggacccgtgggttggctctgcctcagggatgactttgtctgagggaggcagagcgcgtcgtcaaactccgatccggagcgaagggtggaaaacgcgcaaagacgcactattgactgtcgtccctcatcgtcaagctccttctcgacctcatctgccgcactcagcctgcgcaaaagcttacgcgggctttgccgcttctggcggggctggcctgagccttcgccagacggcgacgcgttctccttttcgtcgccggcatggtcccgagcgctcgcggtcagacgcgatcgggccggcagagccgaggctacgttggaggctgctgccggtgggaggtcggtctgccgccgaggaccagtctcacgaccagtcatcgactggatggcgcgccgggaagcggcgggcgccgcggcgagagcagcagcagcgcgagttcgcgagggaagccggtagttccggatctcagtcccttgcgggctcgcagcttccgtctcgggcacttctgaggaagagtagcgcgcgcccgtcagtaaaggagacccgggggagggcccgcggctccgtcgacgtacctgcgattggctcgatcctgcggccctcgacctcgatttcgtcacggccgtcctcgctgccgtctgtgctgctaagcgccaggccctggccccagccccggccctcgccgctgccaccactgagcacacgcgcgccgatgacggcagcagcggccgcaggaacaggaggaaccgccgcggcgggccggccagacgaggcggacgaccgcccgagctctttgacgcgttgcatgagctcgcgggcttcgccatcccaatcgcgcgacgcccgtgggccatgcccgccccgtgctgccgggccaggagcgatgccggcagaggccgtcgccgccgaggacgaaagcgaagcctttgaccgccgcaggcgctcgaaagacgacgagttggtcgcgtctgaagcagctcgatcgacgccgccggagcgcccagaggccgctccggcataggcgagtcgaatgcgtttcgcatcgcgaaagtcgacggcgacatcgcggtccgagaagatgcgggcgccaaccgagggcccagccgcgagcgcgttcgcgctgtcatcggtcgtcgagccagacgaggttgacgaaggcgagccctcgatcgtgtcgacgatggcgctcatgaagtcgcgcgtgaaggtgtcgtaggtcggccggaagaggttgagcttgcgcgcgccggcatcgacaccaccagtgacagtaggggcttccgggatggatgagatcgccgacgagggtgccgtccgggccgcgccatggtcgcgcgcgtgcgacgtgtgcagagagagccgggtcatggtcgttggcgacggctccggcggcgtcgatccaaagttgtcgttgcgcgacgacgccctcgaccgatcggcaggagtggagtgagccgccggcatggggccaaacgagccaaaggagtcgtgcacggcgctctgcccgcctccgttgcttggcgggggcgagactgctggtcggcattcgaactcaaagatctccggccaattgcgctcctggaggctgctccgagcgaggttcaccctggatccggtcaggcccatctcggaccgctccagagtgacggcgccggtctcgccgtcgttgccggccgcgtcttcattttcggccaccgggtcgatcgtcgacgccgtcaggtctgcaggcgtgtatgtcttctggagtcgggacggcacctgcgggacgtgatacagctgcctgtggaggataggagggagctgttgggctggccgcggcattggcgacggcgatggagccgacggcgaggcggaaagcgaaggcgagggagaggggcccgagggcggccgggtgggagtcgtcgacacggtggccggcggcggagtgaggatgacctcgggcagcagcgagcgcgcttcagacgagctacctgcctgctgctgctgctgctggccttgaggcggcgacgggggctggaacatgctctcgaggcggaggggtgagaagaggctccgcgagcctggcgagtcggccccgccgccgacgagcccgcccgccgcttggagcttcgcgagaggtccattgagagcggcgtcgggcacgtcgtcccggacgacgaacgtgccaggtgcggcaccgggcgagctttcgccttcgtcgtcgatagagcggaacgagccggctcggccggcgtgttgacggagcgacgcgtcggcgtcgttgcgcgcgccgccggacgaggctgccgacgaaggggacgacatgggccactcttcagaaagctcagccgtctgccacgacggacgcgaccctacgagagccatgcttgctgctgctgtgtgggatctctaacttggtgagcgttgaccagagggagacgagcaggcgagtcgggaaggtcaggcgcgacgcgtctgagcgatgcatagcgacaaacttgatacagatcgagggggttcctccacttgcagctgccagagacccgatcagccctgcctttattctgaaggagacttgaagtgatctcccgaaatcgtgaagagacgaacgggatgcgagacagctgctcgtgtgttcgagctgatggaagagcctgggcgcggtcgagcgggagcatggcatgcttcggtcagccgtgcgaacagctgcgcgcccagacaggattctcgcctgcgggccgcctgctcgacggctgactgaacttccctgctcggaacctacaatccaccaccaaccctctcaacgactcactcagcttgccttctatgtcgtcctcctctgccccgcaacagcccccgcatgacggcgatgaccagccggtccaggacgacgccggctcgatccactcggacgacgccgaggagatctacgaggaggaggaggacgacggctcgcggccgatggactcggactcggacgacgacgacgctgccgccggcgacgaggtcatctcgggctcggccatggacagcttgcgtgatcttgacggcatgcgcgtcgagggcgacacgctcgtctttgacccggacggcgacatgggcggcgtcgagaccgagggcggtgacgagcaggaggccggcgaggagtacgtcgacaacagcgtcatgcaggctggtgagtgctgtccttggtcccgagagctggagctgctggagctctgaccgtgttcgttgaactcagcttgagcttgagcgcctggctgacatgctctccctccggcagccctgcacaaggacggctcgtccgtcttcgacgtcgccctccaccccttccacccgtcgccaccgctcgccgtcagcggcggcgaggacgatgcggcctacctgtttgagacgtcgaccggccggatggtgaccaagctgacgggccacaccgactcggtcgtctgtgtcggcttcagtgcgtcgccatagcttccagtgcttaacccctttacgggccgctgactcttcccgccttttccaggcccggatggcgagtttgttgcgtcaggaggtatggacggccgtgtgcgcatctggaagcgtgtcggcaaggagtcgtacggcgagtgggagttcctggccagccttgagggtccggatgaggtcaccgttcgtacctctttagtctcagcagcagcccgtcgcttataacccaggagactaacgttgcgcccgatcctcccagtgcatgacgtggcatcccaagggtgccgtccttgtcgcagggggcgctgactcgaccgtctggatgtggcagcgtgcgtgccaaccgacgtttcctgatgagcagcatcgactgcgccgactgctgagcttctgcctctcgcctcgccacagtgccctcgggtaacacgatgcaggtctttgccggccacaccgacaccgtttccgctgtcgcgtggacgcctgatggtgcggtcttctgactgcgcgctcgctctctgttcgtcctgacgctcctctccccggcttccctcttgcgcacaggcaagaagctcctgtcgtcctcggctgattcaacattaattcagtgggatcccaagacgggctcgtcgattcaaactttccggcccgaggacggccggtttgcgctcgagaacggcatcaccgcgctcgccgtccacccgtcgtcgaacctcgccgtcgtcggcggcagcgagggcggcatccgagtcgtcaacctcatcaagggcgagacggtcgctgctttccagggccacaaggagggcgagagcgttgagagcgtgcgcttcatcgacatcgccggcaatggcgttgtcgtcagcgccggcactgacggaaaggcctgcgtctgggacgtcacgaccggccggctccggtcgacgctcgatcaccaggaggtgcgtggccaacagcccctacgttcgcctgctgcatggcggatgctgaccatactcccccctgctcctccaccgccgcagaacgccatcacctcgctccaactgcatccagccccgcaacagtatttgatcacgacgtcgtcggtcgacgcgacgctcaagacgtgggacgtcaggaatggtacgctcattggcgagcatcaaggccaccgcgacgtcgtcaacgcctttgccgtcggcggcggaggcgatggcaagagcgccatcgtcagcggtggtgacgacggcctgagcttcatctgggtcgtctagatgtgacttccctgcgcagacttgccgtgaaggagggggtcatggcagacacagcggaggaaaaggaggcacgttgagtgggggaggggggatcttcgtccaccgcatcaagctcgggcgcttgaccgccgggtcgacgcccggcgctcaccccgctccttgtcgcgatcagcgagctcccgggcgagccgctcgctttcgcgctcctgctcgacgcggcggacctcttcctcgtactctgcgccgatgcaagcgacatcctcgccgcgctttgccgccgcaccgcgcgcgagcgagtcgagcatccgctgcttggcctcgcgcgcatccgggtcgtcccagttgacgcgcagcggctgcgactcgtcgcccggatgcgggaccgggtcagacgagtgggccgggggcgagttgggcggagcgaacgaggacggcggcatgggcagcgcgacgagcgaagacggcgagccgggaccagagagctgcgctgtcgcatttgatccgccgctgccggtcgagggcgagccattcataccaattgtcgtctgcaagtgagcggcgtcgaaaatcagctttcggcatgtgatggaaacacagtggctttgactgaccccctggcggccgagcacccgcttccgcttcgtcggccggtcgttaaaggcgcccgccgctgctgcgaatgcgactggcgacgatcgacgcttctcctgctcgagctgatcgatgtacgcccggacgtccgccgcaatcgccggcggcttcggtgagattccgttgttgtcgtcgttgccggcagcaacggcgacacggccgacagacacggacagaacgtccgactttgagcgcaccgccgggacgggcgtgtgcgcatcagacgtacgcgaccggaccttcttggccggcatctcgacatcggcatttgtcgtgacggcaagggcagctggaggaagtgagcgtgccgtcttcggtccgagtgccgttggcgcggccgctttaacaggggaggtcgaccgagcttttaccgagggctcagcagcgtcgtcaagtcctggcagttcaggctcggcttggttgatggcacggatcgcaggtgatgcaacagcggccttctcaagagactcgcgcgacgtcccctctgccgcgggctgcgcgcgcgtcgatgccggggctggcgccggcagagggggcgagacggcggtgattgcaggcgagttgcgaaccgcaagaggcgaaactgaaggaccgcggtggatcgagtctgaatcgcgcaaatgagctagctcagcatcggtcgggtgctgacggatcgcgaaaacatgcgcttaccgtttgcgtttgatgcgccaagacggaagccgttgagccctgggaagcggcccgtcttggccgtctccgccagccagcgcgggtcgagcacggggatgttccagtcgacagcgtgcttgtacttctcgccgctgacgtcgccgggcgagcagacaaggtgcgtgacgctgcgggtgagtgcgccgacaaactcgccgcctgcaaccgttcgaatcaaaccagtcagcgacggatgagggcgaaagtcgcgcgaacggatgacgcaccgaaggcctcgatcaggacgcgcgcaaactcctgctccttgaagtcaagcttcgtcgggcagaggcggacgctcgacgcgccatgcaccggtagttggatctcgagcggccggtggacgacgctcgagccgacgtcgaggagggtgtccgcccgatagcagttctcgacccagtgctgcgagacgaccgtcgtcatcgaccaattggcgagctgcgagacgggctgcgggcgtcccctgcgatccgagcaagacagacaccatcagcgggcagcgactcaagatcaaggtcaatagcagggcgactgacgctctgaacttgaagacggcgtaatctgcgcccgctccccaagtactgggatcgtcgccgaggaccaagccgcccatgtactggacggcgccgatggcttcccgctttgtccggcccttgccacaccggacgaggaagcggaggccggcaaacggctgatgacctttgtcgcgcggcaccgacgagccggttgacgaccgcggctcggcctcctctgggatcggcgagggcacgtgcccgaggagggagttcggattcagtgagttggccgagagcgttttgggcagacttggttgccgtgcagagaacgagttggagcgtgagaaagaggcgacgccattatttgaccgagcaaggctaccagcggaggccgtcgccgtggatgaggtcgccgagggccgcttctgcagcgacgctgcccgcgagtcgagcatgtcgtccgccgagccgtcgtcgagcgcctcgaccgcgcgtttcttgcccttgctcggcgcgctggtctgcgagagcggtaggtcaacaccaccgaggatctcattcatgagaccctcctgccagccgacctcgacggctgcgctccgactcttgtcaaaggaagacgcagaccgacggagccgtttgaggacggccggctccgcatcatcgccggcggccgtcgttaccgtcgtgctggaggccatcgagatctcggtcggcgccagaaggagcggtgaagggaccgacttgcgctggcttgagtcgggcacgccagacgagttctcgaccggtaagctaattgtcgagtcgagagcgcgcagggtccggctaatagggagctctggagaaaatcgtggagaggggaagggagtgtcagcctggacggatctcttggcgtgaacgaagatccgtgcgtgcgcgcacgcactcttgacaacttggcgcttgatcttgtcgtgcggcacgtcaatcgtgtagccctcctcgcgccagcggccccgtgcctcgaggcagtcaagcacccactccgtccagacgatgtggatgtctttctgatcgcgttcgcgttcaatctcgcgcgtggccctaccgtccgcggccatgaccttctcgacgtagcggaccgtccggagcggcttgttcgagacgatggccatcgtcagctcctggttggcgctctgcgcccagctgagtaaggaataccggtcgttagcgtccttgtcgcacaatgagcctcctccatacgcacgtgactttgtcgctcgtttcggtcagcgtgaccagatgcgtgcaggtacggtcgagcgtccgcgaaatgaagccgccctcggcctcaatacccttgatgagcttcgagcgctgctcgcctgcgagacggggcagttgtcgtcaggacacgagaacggtgacagggaggccagggcggcgctgcgcaccaagctcgaatcccgacatgcagaaacgcaggccctggaagatcggaagatggtggcccttgaccgactggcgagaggccgagcgcatacggtcagcccaccgatcgaggtctcctggggccatgcacgtcggcgcacctcttcgagcgagacctcgccgccgtctcgccaaaccatgtggcttgcgcggatccagccgtcgttgacgatctcgaagccgagctcgagcgcaacctagcgaaagatgatcgcaacacatgtcagcatgtaaggaaaaagccgggcatgcctgcgtgagggccgtcggtgacgccggcgcaccttgtacttctcggacgcgaagtcggacgcgacgaggtgcgtcgccgtgtcggtcagattcgactcgacgatcgcgccgagctccttggccatcgccgcgagagccggctgagtgtcagaatgacagcagagaggtcagcaaagcagtccctgcagccgagcctcgacagactctggcggctgctcgaccgacctaccttgtcttgaacgccggtgaagcagacgaccgcgcccttgaagggccgtgacaccgtgttcatggcctcgatgccgacctcctcgccgtcgtccgcctcgtcatctatggtgatgtaaaggtaaagatgtcccgcatcagctccagacgccggccgacctcactgcctacgatggccgagtcgaagaggacgcaccgtgcttcctcttgctcgagcgcgccgcctgcgcgtctgagcgcgagctgtcctgggccggtgccggccgcagacggacgccagggatcttagtcgacttgtgaccgcgtgccataactgtggagagagctgcctgtcggttcgtctgccagtccttgcaaagaaggtcgagatgggagtcgagggccgttgagtgagtcgtcgtcgagcggaccagggcaagcgccgccgtcgcgtcctcgacttggttcggccaaatgagcttcatccccgccttcccgaccgccatcgactcatctctcctgccggacatctcgtagcatgtcggaccgctcacgctcgcctcgccgggacaaggaccgctcgtcctctcataggaaggacaaggaccgccgcgacaaggacgacctccggcatcgctcgcggagccgctcgccccggcgcgacgacgtcgacctccagcgcaagtttggggttgacgagatcagcgttgaccactatttgtgcgttggccggaaccccctctgctactactggagctgacatcgcgatacatcgtccatcgcagcctgaagagtgccgaattccggctctggctgaaggaggagaagggcaaagtcaggcctcgtcgtcaacgagctggtgctctctgctcgccatctgaccatcctagccgccggatttctcctcgcagtatctcgaccagctgctcggcgacgacgcgcggcactactttcgcaagttcgtcaagaactggaaccggggcaagctctcgcgttcgtccactacctgaccgaccgccttcggtaggtctcctccggttgacagcgtcttttctacagggacctactatgcgcctctgacgtcgtcgtcccgaccatcctcttcgcagacgtcctacaagtgggcgtttgccaagaatggcgtccgcgtcgacactcgcgcgctcgactcggcccgcgccgccgtcatctcgatgaccaacgcggccaacccggcagccgtcgccgaggctagctcgtcctcgcgccctcgggtcggcccgacgatgggcccatcgatgggaccgtctgtcatgggcgcccagcggccgagcgaagcggaccggacgtacgatcgcgagagtcggcacgagcgctcgcgcgacgaggacaagatagagcgcaagcgggcacgggaggaggagaaggagagccgctcaggcggccgagagggtcggctcgagaagcgcaaggaggtcaacgccggcaaccggcagatgcgtgatcgaagcccgggcgggctcgagctcgatgaaggcgctctgctcggcggtccaacgaacgagttccaggccaggtgtggccgtccgacctgaaacgcaagctcgaccatctcgctgaccactgcgtttggcccttatcagaatcgccgcgagggaccgcaacactgcccgaattgaagagcggcgcaagcgggaaaccgaggcccggaagcaggcgctcggtgcgcagacgagcgccatggcccagcgaaacaatggtgagcctctgacggagactacttcctctcggatactttggctgctgatcatctctccacgctctcactttcagctacgatagagatgttcaagtcgatggcggcgcagaagtttggcggcccagcctgagcaatcattaggactcttgatgaacaagcaggcgattgctggacgcgaaaaaatctagggcgcagataagacaaaggggtgcagtggaggctgagaggggatacaagactggctcagtgcacctggccgacttcgacgacgccgcctgcaagagaaggatacgtcagtgaccagccaatctttgtgcccgcggagatgatcgaaagcacctttgacgccgactgcggcaagaatgaaggcagcgccgcaaaactgccggtcgcacagatgtcgcgttagaatcgaaagacagaaccaagtgtagagcgaaattggactgacgcctgccgtcgtccagagtccggccttgtagccgtcgagcagcaccgcgtcgtgttcgcccgtcagcttgtcctcaacacctgttacgacagcagcggcgatggcgacgccgcacccagcgccaatctgaaatgaaagaggtcggtcagggggtcagcccgagagcaacagaggaacgccgttgagacgtcgtctcacctggaaggccgtgttgatcagacctccggcaagactgcgtgcctccggcgggacggacgccatcagcgcgaccgaaatggcgttgtagacgatcgagatgccaatgactgcgggtcgaggtcgaggtcagcgggtcgcaccgcaagctcagttattgcgacgaagcagccgctgacgcaccgccaatcatcgtccccgggaaaacggtcccccagaagccgtgctcgaccttcatgaccgcgacgggaatgaccgagatgaaggatagggcgaggccgacgaggacgagcgtccgaatcttgatgtagttgacgccgatgccgacgccccacgaggtgatggcgccggcgactccgagcgggatgaactgaagagaggtccgcagggccgagaggtggaggatgttctggcgaggtacggagaggagagagaccgtcagacgggtctcgcaaagcctcaggagcgtcacgacggacgaacctgcgagatgtacgtgcagtagagcacaaacgtctgccaccagcagtagatgaggaagccgcagacccaggtcgcggcaaagccgcgctgcttccaaagatagttgggcaggatagggtccttgacgtacttctcgacaagcgggaaggccgcgagcaggacgacggcgacaacgaggagggcaatgacgtagctcgttccccaaccagacgcttcgcccgaagtcaagacgaacgtcaggaggatcagggccgtcgtcgcgacgcctgctcctatgaaatcgagcgatttcttccgcctgtagtcaaaaggtgggcatggtcagtctcgcgcggtgcaagagcgggctcccttggcgggacgcactcgtttgcaggcggcttggggttgggcaggacaaagtaggccgcgacggcagtcgccacgcctgacgaagagagccatcagctatcagttgtcgtcatcaggacagcgcaggaagcaagctgacgcaccaatcggggtgctcagccagaagacccagcgccaggacaagacgtccgtcagcacgcctccatagatcagctgcgcggcgagcagcgagaagtcagcacttgttccctggcagagacaggagggagaagagagactgacgccgacgacaaagccgagcgctcctgcgctgccaaagatagtcaggcagaggttgcgctcgcggccggtaaaatagctcgtgaggatgccgacggccgagggaacggtgcaggccgcgccgagcccttggagcgcgcggaagatgcagaactggatgagcgtctgcgagaagccgcaggcgagaacccagatcgagagccagacaagacctatgcgaggtggccgagtgttagtagtcgaaaccgaggcggggctgtcaagcaggcgaaacgtaccgccgatgaagctggcaggagcaagcgactaaggttgtcagatgctgagagcgtgacgtgctcagtcaaactatgaagttgatacgcacagcagctttttgccgtaacggtcggcgagaacgccggcgagaaggaggaacgagccaaaggcaagcctgttgttcgactccgcgtccacttgtcagaggttggagggccgacaagtcgtcgacaagaaacgtacgtgtaggacgagatcagccacgcctggtcggcctgcgagatgttgagttcctctgcgatggccgggagagccatgttaaccgacgtcatcgagacattgtcgagcagctgggcgacacagatcgtcccgagcacgagctttgcccggagctgcttgagcgagcccgtgtcgcgccctggcgtgtcggacgccggcggctcttggatcccgagctcagcgaccgacgaccgaccatcggtggccgccccgttcgagtgcgaaggccggcggaggagcgtcggcgttgtcccgaggtcgtgctgcgactgcgaggccttgcgcagcgtcgtcgtcgaggccgaggcaagtgcactcttgtcggcaaggtcgcctccgccgccactctcatgaccgccagcgaggaccggtttgtcgatatggaacgcgttcatcggccgcaagctgtcgacaccgctcgaccatttgcgctggcgagcctcagcgtcgccggtgaacgagcccgagcgaggcgtccaactagcagagtcaatgccgccgtcgcgccgagcgttgctcagccggcgaacctcggtcccggtcgcgccgcgagactgacgcctggagaagcgtctcggcacagctgagacgacggcagggaggtcgtcgtcgtcgctgtcgtcagcgagggccgagtcgtcctgaagcgaggcggctgttgcagccgacgagtcgggctgggcgaggctgctgatgatgctagggtcgatgggaatggctggggcggacatgcttgagcgcaggaggagggtgagtgttagcatctcacagcagctgctctgcgctccttctcctggctctctaagcttgtttctctgttctcaagcaatgccggcagcgggaacagggcttggaggtgccgccggcggagctccacatcgtcgggccgatctctcctttccgccgaccgtccgacgtcggggtcggtcgtcaaggacgcgtctgccctaaagagcgatatacggtggtcagctcagcgtgcagccggcgaccgtattggagagaagtcgtctgaacacgagtgtgagcgaggcgtgtcttcagccctctgcggtggcgctgcggcccgagctccgacccatcggggcactggcggtcggcgatggcggttttcttcaatgtcgcatccattgtcgcatgcgagcaggtgagctccaggagagcttcttccactgctcatctgctcagccacccaaggcgacggggatgagcaactggaggccgtcatccctccgaatggagccggtcgtcggcgtgggaggttggtcgtcgctcgtcaatcgcagcgatgaaagagggttctcacgcgctctcgacagggtcagagtgcagcgacacagaccgcttacctctacttggtccgagccgccgatgccgccaaaaagatcgaccggtcagctaggccaatggacggagatcttcttgcaaggcacgagagagagagaggggcaggggcggaaggtcgcaagctgtgccagcaggcgaagagagttggtgccggggcagccgcgcggccagtctcacctgcgccgccgtgcgttccgcgagcacttccgcccgacgatgaccccgccttaggccgcctcgattcttcatgccggcagcaggcaaggccgtcgggtccggctgcacgcagagccctcgttggcccatcgcaaagtgcgccgcccaggatagcgggccgagcttgggacgctcagtcggcccggccggcgagaccgccgcccgaccacgaggcctgcctcacgggtgcgccctgcaagctccccgtttaggcagctccgcttgccctggccctcgcagaccacgcgcaggaggtgtgctgacctccctgccggctgacgctggaagacactttttgccctccgaccgtcagaccactcttcctgcctgagattcctgcgctggccatcgaggtgaaggcgcactcctcctcagctgggttgtgggctcttctcctctgaccgtctcctcgcctctacctcctgctcaagcggccctgtcggtcacccccctccgccgcctcctcttcctgatcctctaacctcctccgcctccgcctctctccggaccgactcccttcacaagatcccttctgctaccggtccagctttgcctccggttccctcgtcgccagccccggtgcctccttccagccgacttctctgcaactctcttcggcccctcaattccttgcccacgacgtcatctttaagcaccaccgctgtcgccgctgcacccgggccctccctcccatggacccactctgtccgctcgttcaatctgcgctgcctccgccgagaggctcgctctcagccggccggccgacgccctcgccagtccaacgcccgaccggcctcgccggcctgctcaaccctagcccggcgcatccaccggacgcgtctgacgctcaaccaccgactccgccgccaacggccgcctcacagcagccgcagcagacaccggcggtcgcaggcggcgacccctggacgtccttcttccctcagctaccgcagacgcggcgccgtcgggcacaggcaagccctcggacctggtcagatccagcgctcgaccaggttgctcatcctggtggactccggacgccatcgccctacccgcgcaatgcctcggatccgtcgcccggcccgtcttactcagcgccgacaacccaggtgctctcggtcccgcctggaggcaattggagccgctcgtcggcctcccaagcgtcggctgacgccttcctgagcgagagcgttccgcaggctatcggctggggtggacacgatcggaaacgcaaacggccgagtattgaggacgacgacggcgcgggctcaccaggcgtgcgaattgccgagccggctttgccgaagggcgacgccaaccgcgccagcgtgaccttttatcgccaggtcgcgccccgccggacggttggcgacgagccaatcttgttcgtatcgtccgcggacagcgaagcgcaatcggctctgctctacccgccccctccgacacgacagtctcgggcgtcctactctggctcgcaggtagcgtcgacgcctcagtcgtcgctcaccagctatcaaggcggtcacgtcaggccatatgacgagcgatcgtcgccgcctgacgtcccgggtctgctctacggatcgctcggagccgagtacgtctgccaaaaaccttttctgtttatacccgagcgggaccgtcttactgattctcggccactttcctgcagggattctcggcagcggatcgactcgcgaggcaaggccatcagcattggcagcttcagcggatctccgtgagtcgctatcagagggcggagcatcggtttcgccacccctgacgatgctcatcaacctcttcgcagcgacccgagcagcagcccgttgccgctatcgctggacggcgcacacgctggcgagaactcgctacggatgagcggtcttccatcattcgatcacgtccagcagcgtcgttttcctgccttcgtccctcagttgacgttcgagggcgggtcgggaacccggcacggccacccggacgagtacctcgcatcctccccttcattcggtcagtcatggtatccaccaaggccagtcatccaccatcatcatcaccactatgcggccccgtcgcgagccgactcgacctcgtccgcgggcgttgacggtagctcggccagaagctcgctcagtaacccggcgagtcatggcccgacgaccaccctgacgacaccttcgatcggactcgtcgagtcgccgcctggcagctcatcacggagcaggcagggcagcggtggctctcgagatctcggctcgccacctagcgaaggtgcggatcggactcgttcggcccgcccccgctcctccaacgagtcgcgctgctcggcttccggcacgcgcacccggccggcatcattcgaccaaaccgagcacgagccaaaacgacgccgagctggttcgctctcgcacaaccttccttctggtccgacggcttccaatccgcaagagccgcgccggagctccacgccagtcgaccgacgggctgcgagtttgcatggccgctccgactcgtcggactacgagcgtcacctcgatgcgacgccccgtgccggcgagcgccgcccccttttgcgacaccgaggcgcccagtcgactgccaaagggccaaaacaaccagagctcgaccgacgctactccgatccaatctcccaccactcgtcgacgacggcgatgcccgccctgatggaggatcgttcggcttcacgaaccccgatggactcgcccggctctagcgccgacgataccgcagccatctacgccatgtcggacggcgctctctcatccaagcagcgctcggcgcggaagcgcaccgatcggccggcgccgttcgcaggcgacgaacggacctttaccctcggctcgccaacaaagtctcgcggtgcggcgactgagcctcaccggccggtcccgctgccgtccatgtggctcgcgccacctgatgccggcggcgacgcagcgcaggaaggaccagacggccgccacgttcggctgccgagcctaaccgaggccctgcgtgagctagaggtacgcgaggccaaccgacgatgatctctacgatcgctcgtgtgccgacctactctcaatctcttcgaccccttgctcctggacattcctcatctgcccctccccttcccaacgtagactgccctcgctctctgtattaccagctctcgagcgtctctataacgaacctcacgacctcccatacttaatatcaaacatcgacgtctgtcatgaaccgtgagccctggagaagcagaaggcgacctagttgcacacgcccgggccgtaatggctagcagcagtcgggaggaggaacgaggaggacgagcgccgtcgcgcagcaggaccaactcggtgttgtgcggggcatcgccggcggccgaccggccatcatgactctgcatgaccggaggccggcagcaggcttctgcaccgtcttggcagctgcctactgaattttcctcatccattgaagagaccagggctggacatcatccattgacgagactagtacggcctctgccaggtctcgacacgaacgacatctcggtctctcaacaacaactcctctcgccccacgatggagaccgctcaatctcatcctctggccatcgtcagtcgcacccggctcctaccttcgttccagcagcctcggacacggacgccgctctcgatcctcgatgcgacggttgcccgcttctcgccgacagcggccgcctggatcttcgacgagacgcgctcggtcgacctgctcggccaggcgctccagacggtcgtcgaccgctacccggcctggactggccagcttcgcttcgcccacgcccacgctgacagcagcgagaccagcgtcagccatgaccatacgaggcgctacggccgactcgagctcgtttacggcggcctcgaagcggaagacgctgtgtcgaccgacccgggcgtcgagctcatcatcgcgcactcgtcagtcccgctcaccggccgtctgcctgatctcactgcaggcggcacctttgacgcggccgacggggtgacgcccgaggagctgctcgataaggagacgccgctcgcgcttggctcgcagctgagcctgccggccgtctacgcccaggtgacgaccttcgagggcggagggaccgccatcgcgcttaaggtcgcgcaccctctcggtccgtccttgtgtcggccggccttgacctttgctcaccactgatggaaattcttctcccctctagccgacgccaaggcgttgattgactttgtcaagctctggtccgaggcgtacgttgcctttgcggagggccgttcgccgacggcaacccctcctgtcgttttcgacccaggcgctctcgaccgagcggcaaccggcaacctcgacgtgcgttccccgacgccgaccctgctcgagcttgcgtcggaactgcccatcgcgcgctacgactggttggcgtcggccgcaggtgcgccggcttgggccgcccaggccgtcgcagtcccagccgagctcagtccggccgccgtcgggcagctcggccgggccctgccttgggccgagtgggacgtcagcaagacgtgcggtcagaaggttgtcttcttctcgcctgacgaggtccacagtatctggcaggcggcgaccgcctcgccagcgttgcggcttagccatctcgacacccttgtcgcacacgtctggacgctcgtctgccgcgctcgggccgccgccgatgagaagggaggcgcacggtcaccaggtccgacgacgtcgcggctctactacacgcttgatgcccgctcgcggctaggtccgccggccttgtcatcgtctttcgtcggctcgccgatcgtcctcgccgaggtagcaaccccgacggccgacctgctcgactcgacgaccagccctggcgcactcgcccagcagatccggtcgaccctctctgccttcacgccggccaggacggccgcccatctgcatgcgctcggccatgccacctcgagccagcggacgtgggacgccttcctgggccatggccactgcatcttcacctcctggacgcgtcaggccgtctacggcatcggctttggcggccggtcgccggcctgggtcggccccgtcatgccctgcatggacggcatccttcaggtgacggagctcggcaaatgcggcggcagtggcgactggtgggatgacggtgtcgccgtcagcatctgtctcgagcagggcgcactcgaccggctggtcgcagacgaggctgcgctccggggtcggccaagcgctggcagcagcagcagcttgtaaagatggacatgtaaaaccgagcctgtcagagatgtcgcctcgtcccatcagtgaccgccttgggaagtcttggtcgatgagtgcccagccggcttgtacgcacgtctcgctccgtctcgggctgatcgttgcgttcgctcgcgcgcagacggacgctcgtgcctccgacctcgacccgccttccgtcaatctccttgacccgccctcgtccccactcgctagaacgtacggcagtcgacatggccacaagctcttcaacgcttcaggtttcggggccaaagcctgtcctcctgtcgaggccactgatggttagtccccttggctgccgacgcgacctcgcgttgagctcgtcggcctcgagttgacgagcctctcgatccattgcaccttcccaggagtcattcaagccggccaaggtactccaggggacacaggaggcaggccacatcgtcacgtcgatgtcatttgacccgtcgggcgacgtcctcgtcacctgtggctccgaccacgcgttccaggtcgtcagctgcaagagcggcaagtgcgtcgtcgtccgccccctcgttcgaccatggctcggcaggctgactcgcgttgaacgtctcgcagggtgaccaagactttcaactcaaagaagtacggctgcgacctcgttcgttgccttcgaagcaggaacggcatcctcttcgcgagcacgatgggcaacggcgcgtctctcctctctctctgagcccgctgcgcctcctgcctctggccatggtagcgtcaagcccccagctgacatacttggcctggactcttcttaatagacgacatccggcacatgacgacgcacaacaacgtctttctcaattactttaccgggcacactggccggtgcgtctgaaggggggctgcgcctgctcggccggagccggagcctagcgacgacgcttgacgactgacctcctcgcttgacagcgtgctctcgatccacatcaatccgaccgacgacaccttcatctcgtccgcgatggacaatacggtccgcctctgggacatccagcagaagaagtgtctcgtacgtcgtcccggcgcgagctgctcgcagctgcgcatcagcctcctcgccctgacctgacgacacaaaccaccctcctctagggcgtgctagaggccggccgggaacctatcgccgcgtttgacaacacgggcaaggtctttgccgtcgcacacaacaacgaccggcgagatgccattcacctgttcgacagcaagaactacgaaggggtgagtcggctctctcgcccgcgatgcctgcgtgctctcctgctgacaaaggtgctccgcacctcgcgtcttccagggctcgttcgactcgatagcgctcatcgatccgtggctgcaagggtcgaccaaggcgctacctttgctaacgtcgctcagcttctcgcccgacggccgcaacatgttgatcggcacggccgacagcgtccactatgtcctcgacgccttcgacggccatttgctccggcgactcattggccttcgcgggctcggcaaggtcgacgagtacggcaagctctgtctcaaaccgcagaaccgcaacgggagcgggcaggaggtctgctggagcccagacgggcggtacgtcatcgcaggtacgtcgctctcgtccgacctcgtgctctacggacgctgcgtctgactgacaatcttatcgctccgtaggcggcgcgagcggccacgtctttgtgtgggacgtgctcgacgtgcctccggagggcgcccagccgccagttcggcgcgacggaccagtctggtttgagattgagccgatccttaagcgcgaggcctcgaatggcaaggccgtcaaggccgtcggcttcaaccctcggaacgccatctttgcggcgggcaccgactcattggtcagtcctgagcgtcgtcctgtcctagctcgcttcgtgatactgactcggcgagctgctctaaactgcgaccgcagagctggtggatgcccgagcgagacaagctggaagaagcgcagtcaaggccgtgatgcgatggctttcagtcgacagataggcgcatgtgatcgaaggggggcagcgagaagaaggagccgaccaggcgaggaagggaggcgcccttgcctactcctcatccgagtcgctgatcgtatccttcgagatgctgcagagaggaagagcgcgttcagagtcaaccagcgttgcactgaatgacagggcctaaggaccggcagggacgaacaacttcttgcccgaccgcttggaagcgcgctcgacgacctcgtcgtcgtcctcgtcgaggatagctttcttgcggggtgcctgcgggggagataaagaacgttcgcaccacaaacttgatcgaggaacacttgccaaagacttaccttcttcttgggcttcggcttcggcttctcctcgccgtcagagcccatcggcgtgtcgccgtcctcgccgtccgggtcgacatacttcttctttggtttggatttcttcttcttgggccgaacctcctcctcgtcctggccgctcgagtgggcctcgccctcggagccgccgacgtcggcgccagccttggcctttttgcgcttcttcggcaccgagggcttcttctcgacgtagtcgaccggctcggcaatgacccagctcgcgacctcggcctttttcgccgcccgggccgccttgacctcatcggcctgcttgcggatctcgaccatacgctcctcctacgagtgggcacggcaactccggtcagcttgcggcctcgagtagaggcacgcgtcagaggccttcgcacctctttgcgctcgagctcggccttttcctcggctcgcttagcgatcgccagatcgagctgggccttggccgtgctctcccagacccgctgcttctcagcctcggcaccctccttgcggaggatcgacaggccgtacttgaaacgctggtcggcgagacgtgggtcatacggcaggttgcgcgagcggtcctgggcgagcgagaggaaaatcctgtgaaggcgaggcaacaaagcttcagtcaatacggagacaggacagcaaggggactagagactgacgtctgagcgtgggcggcgtgcttgaaaccgtcctcgagctcggccagcgtccggcgctcgacattgagcgagacgagcatctcggccgccttctgctggatcatggcaatgttaaagaggatcgccttgtcgtgcggttgcaggtggagcgcctgcacagagcggaaggagaaggaggtcagtctgcaatgcctcgtcagggcacccgccgagcagcgcaccttctgagcgtagcgcagcgcgagctgcatcgccgagaagttgccgtcgcggttggccttgctgtaccacgtccgcgcgaggtagagcgacgtcgcccagtcgacgccattgtagaagcgctgaaaggccgtctcgtactacggcagtcgagaaggggcgcagaaggtcagcgtccgagaggctttggggaaggcgctgccggcgacgccaagagaacgcacgctctcgatcgcccgctcaaactcgtcattggcaaagtagcagtgacccatgttgacgtagacgctgccgtccatgagcgtctcgcggacgcgttggaagacgccaagcgcctgtcgggcgttggcgatccgggtccggctgtcctcgttggtcgccgtgcctggcagggcaagggcgttctcggcgacggctatcgcgagcgcctgggccgcgaacgagcactctgggtcgacgaggagagccttctcgtagagctcggccgcacgcgcgtagtacttggtccgctcgcgaccgaacgtcgccatgccagcctcggtatgggcgtccttggcgtgcggcttcatctcgcggccctggcggtagttgagccagccggcggccgagagcgtgtagacgtcagaccggtgctcgcgcagcgtgttgtacgcgaaatcgatcgcctgcttgatcgcgcccgcgttgaaggcaagcgtcgacgccgtctgaacgaggaagtagaggtagtaggcccggagctcgctgtgagtcgggtgggccgtcagcgcgtccttgaggtggttgttggccgcttcgaactgcaggacattcatggccatcgcggccagccggaccttggctagggaaggaggcgagtcgcagcaagcgcacacgagtcagcgccctgacacaaaactcgagcacgaacgacgcgacgcaccttccgggtactctgggtggacgttaaggatctgccggtaagcgttgtcggcctccgctgtcataccctgcccctcgtaggcccgaccgaggttgtagaggatcgtagtcttctgctggctgagcgccgcattgtcgagcccggccgcctttgtcagggcgtcctcgaaaaagccctgcgccgtcgcagcgtcgccgtcgagcatcgcgagcgcgccgaggttattgagcagcgccggcgactctggccggccggcgtccttgcgggcgcgggccgcactccggtaggccttggccgcccgctcgagcgactcgccatgccacgccttcgccatgtcgacaaagagctcctcatcggctgcgacatcgcgcgaaatggcgctcgacgggccgcccgtcgcatcgacaacgactgcgctcttcgcatcggcgtcgatcatctgctggacgcggtcaaacgtcgcccgagcccggctgcggtcggccgcgcgctcgacgtccgagagacccgggtgctcatgcgcgagcagggccgcaaacatcgcctggacctcgggctcgtttggccagcgccgggcgacaccctcaaacgtgtgctttgccgcgaggtactcgcccttgagcagctgcacctggccgacgccgaggtcggcgacgagcgaggcatgcttggcctcggtgtcggcgagggcgtagaagcgctcggcatcggccgcctcgccgcgcatgtggtggacgcgggccatcgcgttggcgccgccgagaaagtgggcgcgcgtgtcagagtacgccatcgcccgctcggcgagctttagcgcccggtcatagtcgccgttctcggtcgcgtaggtcgtgctgagcgcgatggctgcaccggcgctcgtctggccgctgttcttgaaggccgaaccgacgcgctggaggccgtcgcggacggcgacgagtcgctccttcgccggcgtctggggcagcttggcgtggttgacgcgctcaagaccgagtagcagctctgccgcccagttgtcagaatcctgtcgagagaggtgagcgaggcggtatcagcacccgaacgagcaacccggccgaaagactcgtgatgtaagactcacaagctcgagcgaccgacgccaagccatctttgcctgctgcttgctcccaaggacccagtagcagagcccgatcccgattcgcgggtctggcttgcagtcgggcttctgcgacagcacgaactggaaaatagtgagcgcgctggccggatcgcgctttgtgtagaggatgcgggcctgcggatcgagagggtgtacaaggggcagaggtcagaatcgtcttggccaggctcaagtcgtctgcctgcttctgaccttgcacatgagcgcaacgaggttggccggctgctccttcaggatcgagtcgaggtccttgagcgcctggtcggcctgaccctggcccagcagcaggacagctgccggcggaaaggggtcgatcaacaggcgtcagattcacgcgaaatgaatagcgctggagcaaaggagctggcgactgacctcggctgaggaagccaatgatgtcgagcctctcgcccgccttgtcctgggacacctgcgcctgctggagcatctgctgggcccgctcgaggtagaaatgcttggttttggtgtctaccgggagcttatcgtagcctgtgagccaacgaatagcgagaagtgagttcaaaaatacgttctgcttgcccgcacggggaaaggccacgcacgagcctccgggacgacggtcttgggcgccttgcgggccttgccgagcatcatgttggcaaagatgagcaggagcgggacctggcccttgtagtcaccccgctgcatcttgactgttgattgagagcaagatgcacgaagcggacgtcagctcgagggcaaggcaagaagatcagggcatgagggccgaaccctggaggccctcggtcaccatcatctctgcgagctcgtgccgcccgagccggacgagctcgaggatacagacggcccaagtctgggcgggcgcctcactcaggaccgagaggacctcgcggacctcggcctcgtcgttggcgagctgcgagagctcaaactcgacgagctcgccgctgccgacgtcgacctcgatcgaacggctgttcggctgcgggcccgacggcgtcggcggagcggcagagccggcggccgacatctggggcggaacgagtaagaggagagggagaaggagtgggccaagcaagcgatgtgctgtcgtctagtccgtagctaagtcgaaagaggtgaggagccggtcgtcgcgtcggagggcgtgtcgagggagagcaggaggagggagagtcgaggcggcgcgcagggacgaatcagttctgcagggcccgtcatgtacagcggcgggtcagcccaccccgcaactccgacctgctgcttcgaccgccgaacgacgaccacttgaccctgccgcaatcaccatacttaggatgggctacgtatcatttctcgcgcccaagcagcctgctcctccgcctccgaccaagccggagccggccgtcgaggctagcccggtcgcatcgacctcaaagctcgcccgctcgccctcgccgccgccgacgccggcagtagctcctgcccccgctcccaagagccccaaggcggccgccaaaggtgccgcaggcccgtctcggacgaatggcaagcggccgcgagttatctcgtacctctcggatgacgaacacgagccggctcaggaagatgacgacaacgacgacgacgacgagacgggcgtcgccgcggcccgccagccctcgcagactgtctccaaggtcgcgcgcagggctgccaacggcgacgccggctcgcgcccggcgaagggcaaggctcgcgaaggcagcttcgccgtcgacaaggagcgactccgggccgagaaggatcggctcaggacgacgaggatggagcttccaatctgggccggtccgtccccccgacacgttgcgcagcacctgtggcgagctttctctgaccctgcgtgctgccctcaggccaggacagtattgccgaggccgtcaaggacaacgacactgttgtcatcttgggagagactggatctggaaagacgacgcgtgggtgctagccctctcatgagctcgccagcgctatagggctgaccggtttgcggctggccctgttcgttgcattgcagaggtcccgcaatttctccttcccctccttccctcgcaagcagccgtcgaaggcaccgaagcaccgaagctgcttgtcactcagccccggcgaatcgccgccgtctcgctcgcggcgcgtgtcgcagccgagtctggcacgcacgtcggcggccgggttggccactcggtccggttcgacacgaacgtcgggaagcagacacgtattgtttttgcgaccgagggaatggtcgtccgagagcttttgggcgacaagctgctgaggtgcgccacgcccgtgttggctctcacgaatgcagcacgtgaatctgacatcccatgcttgcagccgctactcggtcatcatcgtcgacgaggcacacgagcggtcgatagcgaccgatgtcctgctcggatcgttgaagcgaattcagcgcttgcgtaaggaggccgactgcaagctgtcgcccctcaaggtcgtcgtcatgagtgccacactggacgccgagcgcttttccgacttcttctacaagtcagtcggctccacaacttgctggaaggcatagtcgctgactttccttacctttgcaatggacaggtgccctattcttttcgtccgagggcggcagcacgcggtcaaggtctaccatgccctagccgacccagacgactatgtcgacgcctgcgtccggacggtctttcaggtcttgctgaggcccaacaacgacgagggcgacatcctcgtcttcctgacgggccaagacgacattgactcggcctcgcagacgatcgaccacctcgtcagccttctgccgccaggcgggaccgacgtccaggtccttcagttcatggcctcgaccccgccggctcaacaagcgaaggtctttgttcctagtccgcgcgggagccgcaaggtgattctcgcgaccaatgtcgcagagacgtcgatcaccgtgccgggcgtgaccgtcgtcgtcgacgcgggctttgcgaaggagaagggctatgtcagcaaacgagggtcgggcatcgagacgctactcgtctcgcgcatcagccgctcagccgcccagcagcggacgggtcgggccggtcgcgaggtgcgtcctaggttgcctttccttccgctgcgccgcccgctcctaacgctgcgcccgcctgtctgctcactccctctttgctcagggacccggcgcgtgctatcgtctttacacaaaggcgacgtacgacgccatggccgcctcgccactgccagagatccagcggaccgacttgacgcagacggtcctccagctcaaggagatgggcgtcgccgacgtacagaagtttgacttccttgacaaaccggatccagacttcagtgcgtctgcctggcgactgactctgcgaaacacgtccgctgaccggctcttgcgcaccctctcctagtcgccgaaagtttaatggcactccatggcttgggcgcgatcgacaacgcgctcgcggtgacgccgctcgggcaccagatgctcaagttcccgctcgagccctcgcaggcgcgcgtcctgctcgcctcggtcgcccggtcatgtacggccgacgtccttgacattctcgcgctcgtcaacgactcgcccatcttcctcgacccgctcgacaagcgcgacgaggctggcgccgcgcgggccgggttcgcccatcgcgacggcgatcacctgacgctgctgaacgtcctccgttcgtacgaggcgatcccgaagaaggacgccgctggccgtaaggcctggtgtcgtgcgcggttcgtcaacgagcgcaacctgaagcgggcgatccaggcgagggaccagatgcgcgacatctgcgagcgcgaaggtgtcaactggcaggcccggagcgaaggcaacgatagcgagcccatcctccgatgcctcgtcgagggcatgttcaaccggtgtgccgtctgggtcggcggagaatatcgccaggtcgtcggcaactcagtgcgacttttgtcctcactgttttcgcatcctgccaaggcgctgagctgactcttcatgcccacttatcaggccgtcaagatccacccttcctcgacgctacacaacaagcgagcacccgcgatactttacgacgagattgtgagtcgcggtggcacgcacatggcaactgccgagcgagcgctgactttgctccgcgccctggctagatccacacgaccaacacgtacgcccggggcgtctcgcagatccatcactcgtggctcgccgagctgccgatgttttcctcgaaggcttgatcccatggcttccttcgctcgacgtgggtcccggccgttcgaatgtaaggcgccggcccacctttggcgtcgtcggccaaagggggtgaagggggccgggtgttcaagccttggccgcagtgaggccggccggcgatccttgactgcgcacgcagtgcaattcgtcagtctcgagctgtcagcctgctctcctgtcgcccgcttctcgcggagctcggtctggtggcaaatgcagagaggagtgcatgaggatcacaagtcgtagccaggcaattttttgcaagcgagcaggactgcgagggaaagagagtcaagtgcttgctgcccctttccgatgacgaggaatctcggccgtcggcgcattggccggcgtggcaagccttggaggagccccctcctgctctcctcacacgacccccgacctttcgcatagcccgggccgagagagagagagagagagtaagaggccagcgcgaagggccagcgccctcctcgacccgaccacgaccctctccttcgaccagctcgctactcgctctcctctcgtcgtcgtcgcccagccagctcgccggccgccaagccctagtcgactccctgcttgctcgcctcacagcctcgcctcctcccctcaagcggcgccctcttctcgccatgccgctctttgcgccggcctcgtacgcctactcgctcctgccagcgagccggcggtcgtcggttgtctcgacgagctcggcctcgtcctcgcggcggtcgtccctgaccggcggcgcggccttcgccggggcctcgaccttgtcgcccagccggcgtcgcacctcgacgccaacggctgtcctcgccggcttcctcgtcgccctcgcctacttttccgtccaggcatggacggacccgacgctgcacgactatctggtcgcaccgccggcgcccgacagcgaggactttgccaggctctaccggacattcaccccgccgccgcgtcgcaggagcgaagcgcaggcggttgtcctcccaacgccgatgtacagcgacgcctgtctcgagtcttggctcggacatggagagccgtgcgctgacctcgggccggaagccagcgtggagctcgacgccgtcatcagctgggtcaacgggtgcgctagagtaagagcgctcactctgcctacccttcggaagctgaccgctgttccgtgcgccttggcagatccgaccctctctggtacgaacaggtaagctcctgccgcggcttctctcagcattcggcgtatgctgaccctcttccgctagtacgcctacttttcgtccgtctcaaacatcccagaaggctggggcccggcgcccatcaggcattatcgcgaggtccgtcgcaagctttccctttgcgactgcgattcagccatcgctgactcttctgcatacggccgagcagaaggacgagctgcggcacgccctccgcgccctccacgccaacctcggcagccgtctgcggacgatccacatcgtcctcggcgactggccctcgccgaccccttcgtcggcagcggcggcggtcgaggtcaaggtcgtcggccaggacgagcgtatcggccagatgccctactggctcgagcaggcgctgttgggcgtcgcggacgaggagggcgtcagcgtcgtcgttcaccatcatgccgagctttttgccgaccggacgcttgccgccaatgacgacgccggccacagggcgtacctcgaccgcgccctcccgacgttcagcaggtacgagttgactatctaatctctgatcccatgctaacttggcgctgaccctctttactttcagctttgccatcgagagccagctcgtcaacctgcccggcctggccgcccactgggtcgccctcaatgacgattgtgcgtggcgatagcatctgagaggctgcctccgacgctgacctgtcaaactgtgcccttctcagtcttcgttagccagcctgttagttagactgtctccttgcgactatcagaagcagagtcctgaccgcttcgatcctcccttcgcagcactcgccttccgactggtacacgcctgcttacggcccgctgcttcggctcgagtccccgaccggcatgtacggccaggtctcgcccgaaaccgagtttccgccggtggcatgcccgcacgagcgctcggccttgctccggtcaaactggcttctctcgcgccgctttggctcgcgcggccgcgttcccgtcagccacatccccaaggtccaatcgacggcggtcctcgccgagagcgccgagatctgggccgacgactttcgcatcagctcgacgaggcgcttccgcgaggttggcgagggcgagacggccgagagcaaggtcggcgacttgcatgccgtctggctcggcgctcttttgctcgttgagcgctctcgcgaggccatgcgtcagtcttagcgcttgattcagatcttctcgcttgtcgtgcggttgctgacaccttccgcgctctctgcacagtctggacctgggcggtcgctcggatgggaggcctcgacggcacgtggacgaccgccgaacgcgaagagctcgcgagcatcctcaacactgacctgactgccaagccgcgaacggccgtcgtccctgcattcgaccacgccaagcgaccgacggcaaccgagcgagtactcgactcgaacctcggcgagcttggtctgcccttgccggacgcaagcaatgtcactttctgtgagtgacgagtctcctttcgcagcgaggtcgtcgctgacgattgcatcttcttaccggtccagcgagcctcgacggcccggaacctggccgcggtgcaacgagtggaccctgcgagattgacctcgacctctgcttcggtgccttctggtcagcgtcgagccctgtgcccgccgaggaggccttcaagcggctcgccttcgagcatccggcgtgcggagactgcgtcctctcggccgtcgtggccgcttcgggccctgcgggcctttccgccttgcttccttcgccaccgagcgacgtagacacgaaggacgccgtcgttgacatcccgcacatgccgctcacgaaggactggcggacgaccgactttactcttcgagctatcgttccggacgtcgagacgatcgatctccgggcctggtgcttgaggctcctcgctcgctaccagtattcgctgggtgggttgctctcccgcccctgcctgagtggaccgcaaggctgacagcccccaccgtttctccgagcataggcgagcaaacacacctcttcgcccaggtcatcttcccggacgacatcttctcgatcggctcgcagctcgagcgcgagcccgtttcgacgctcgtcctcaatgacgacctggatggcacgcgtgcgacccatcgtgtccccctcgccctatggctgacaagctgaccgctctctgtgtgctttgcgaatggacagtcggccagcagcgtcgcgcgtcggacaacattcgcgcgtggctcgacgaggcgtggccgacgcccgcctggtgggagcgcggatttgggccggacgccgctgccgaggatggtttggcctagtcgtgcctctcgacgttcttatgcattcataggttcaacctgtttcgctctacacgacctccactgtattttctagccacactcttgcatgcgccgcttcgctccggcgccttctcctcttctgaatcttaacggcgatactctatttctccactggcctggcctcctgcgacgcttctctcatgaagttctactcgttcgtctacctcgcaaagccctggccatcccaacataggcccagcagcaccgcttttcgccatccgctgcgtcgagttattaggatgaggcatcgataaacccaccccgatgtcgccaaagcggggagcgggcggaaagccctcgccccacacgcgccctcgcgacaaaagtgtgaagagcctctggtgtggcgtctgaagggagatgtgaccggtcgcgcgccgattaggcggcgatggtgacctcgacctcgactccgggctcgagcgagatcgaggtctgcaagggaggggaagagcaaagaagggacgacggggtaagcttgcgaggcaacgcgtgagaacaaggggtcgcgcgcgcgagacgcacgatctgcttgacaacctcggacgaggcgttgaggtcgatgaggcgcttgtggatcttcatctcgaagcagtcccaggtcttggaaccctctccgcagggcgtcttgcgggtggtaatcttgaggaccttggtcggcatgcggacggggcccttgacgcggaggtccttgtccttagcccggttgatgaggtcggtcgagactaaggttgggagggacgagcgtcaggaggcgtgcttgtgccatcgagcggagggtcggctcggtcgcacacttctcaaggttcttgacgttgcgcgaggtcagcgtctggagggaaagaggagctcagcaagcgtgagctacgcgtctcattgtcacctccaaaaccagcagcagagaccggccgagcgaaaagggccagcctcttagctctcccagcgaccaaggcagaactgacgatgcggatcttgttgagggtgggggcagcgacacccttctcgaagtcgtccttggaggccattttggaaagtgaagaggtcttgagggggatggggtctagcgacgtgaacgggggttgaggcacagcggtgactggcagggcaagcgaggttagatgtcagttcttggctctctctttgcctgacagcagtatggtccgacgggcgactgacctagatcgatgaggagcaggagcaagcaatggcggcggcggaacgagacgactgcgaaattcccgcgtgcagcgtcgagcgagaatcatctatcgagtccgtctaaggtcgacgaccgccgcgcagctgccctctcccgttcactcgccgtgcccttcagcaacccactcggccctcctggccgggctacctcgctcgctcgattcaaaacgatgacccacctgggaccgacagcatcagccgcctgggaggccgacgacgagggtggcgacaagggcggagctggcaggccggcatcgtcgtcgtcgtcgtcgtcgtcgtcgtccgaggaggatccggacgcccggccgacggtgctctcagtgcgtgtgcccggctgccttggtcctagacgagagggcgtgcttcaggtcttattgacgcatcctccgctgtctcggctcctctcctgcagaagaagatgcggatggctcgtcggagtgcgtcctcatgcacgtacgcggcgcagcaggccctggcgcactgacccggccggccacctgccctccctttgtccttgcacccaccctccctccagacccaatcaggttcggcttcacgccgaggcctctcctcccacagccgccgtcgacctcgccggcccgaacgtcgacgtcgaccgccgctcggccgaactcgtcagcatcgccgccggcggcgccggcgcgcgtgtcactcccgtttgagaatggctcggacgagtcgggcgagacggaggtcgaacgggtgacgctccgccggcagaagagagaccgaccggtcgctgcctcgacgacaacggtcgagaagtttctccagagcgggaaggtcgcagaggcgacgcagcagctcgcaaagggtaaagggaaggtcgtaaagcgattggctggccggccgggcaattcagggagtacgcctgagccagactcatcattttcctcggtctgaagctgatcgtctggacttgttgcagaggccatgaatccgaaggcgcacctccagccgctcaagccgggtcacacgcgcacgcgccgcgtcccacgccagccgagcgggctcgactcgccgctgagggccctgcagctcgcgtcctcgccgccgaggtccgtccgcctcttgttgtccttgcgtttcatcagatatttgactctgtcgtcgtcgctcgtgtgcacagcccggcacccgtcttcgactcgtctgtccgccggcgctcgaccgccgccagcgttcgcacgcccgctcgctcccggccatcagcctaccggacgccccaccggcccgacttcagcacgttcccgcgcttcccgacgacggccgacgccgctggtgacctcccgacgcccctccgctggccgcaggtcaccccgccgagggaggcgcccgttcgcgcgctctcggactggatgtggggcttcgacctcgactcggtccgcgggaagggcgtcagggatgtcctcggcgacgtcgacatgattgacggccggacgcctgctgcgcgacgtagagcgggaggcggaggaggaggaggagggcggcgatcgagcgagaaggcaaaggcgcagcggtcgcccggtaacgccggagccggcggtgggaacgaggtcggtcggcgaaacggcctgccggcgttaacgctcgtccagccagagtctgacaacgacgctgatgagtgcggcctctgttcatccggcgcatacaaccctcgatttgcagcaaactgaccgacgcgcttcacaccaaccaggtccgccgccaactcgccgtaccgccttccagctccacccctccgacccgccggccgactgccgctcgcgtccggcgtgacgcccacgaagcggccgcgtgccgcgcagcctgtctttcgcccgcggccgttcatcttcccctcggtcccgcagcgcgacacgctctcaactgcagcgctgagcgagtcggtcgtagaccgcgagacgaaccgagagtcatacgagcatccttcgttgagcacaactgtcaacccgacggcaacaaatcttaagcccgctgggcgtcacactcggactcctccggcgcggtcgtcgccactcctgccaccttcgacgtccaacatcgcagagtcgtcggccgccgcagccgcgaccgacagcgctggacccgctctccagcactcgagccagcgtcagcccagcatgccgctctcgggcctgatcacctcgcccctcagcgaattcctcgcgcaggattccacaactggcctgaagggcaagggcgtgccgctccggcggacgagcgtcgtcgggccgaccctgagacgcgacgcttttggcggcgagacgatcgactcggtcgactcgccgggctcgccggctgcgcgtcaggagccgagaatcgtcggacgctcgggctcgaccgtcgaaaacggctctccgacggcggtcggagcgccccatccgaggcccacgccaagcgcagacgtctcgatccaagagtcgacggacggctctgcagtcggacgagcgcttgctgcgccggcggttgctgtcgccgcgtcggcgtcggtcgagtcgttctcaggcggcatgtcgttccctcctgatgaggaacctgtgcacgacggcgccgaaccgatggacgacgtcgtcgagggcaacgaagacgttcggcccctgccgccgttgacagcgacggcacaccgcagccaacccttaacgaccgaggaggcatgcgaggccgcccttagcaagccgctcattcttgcgctttcgtccggcgaccaccgtcccccaccggcagcagcgcgtcggtcgattcctcagttgccgccagaggaactcgtgccgctcacccgcgacctcagctggcgtcatcttaccttgagccaggccagcagcgctgctaagcgagtcaacacagttccacaagtcgaacttggtcacgctccgcgaggccagttttcggccatcaggaccgactcgctcacgcctcagcgttcctctctgcccgcgcctttcgccgccgaagccgaggcgccggctgcctttggcgcaaagcaatccgccagagccgccgccgtcgatgactgggccctcgagggcatggtcaacctgaccgaaattcttgcctacgagcagcaaaacttcttcaccagcagccgctcgactaacgacgacatggacgttgaccccgactcggccgaggacgccgaggccgaagcctggcgggtgatggtcgaggtaatgaaggaggccgacgcggcacacggcccggccgatcagcgctcaccgtcgccgacgcctgtcgaacagacaccggtccttcctcccggttacgtcctgccgtcgctccacttcccatcaagcgcgacgcccgcaccctccacgccaccttctacaccgcccgccgctccgccgctggcattcgcaaccgtgcgcaatgtcaagggtatccttcgcttgtcgtcacctgcgaccgaggtcgacacggagggcaagagcgcgacgggccgctcacgccggtcaaagacggttacgtttgcgccgagtgacgacgagggcaatttgagtgacgcccggcacggccggtccggtgcgtcggttcctttgcgcttcgtactctcctggctcttcattgacgctgcgcctaccacccgaacagctccgcccgcagctcgcagcctctccaagtcgctcggggagcctcgtccgcctgccgcagggccgtcccgcaccagctcaaacccggcgccggcccaccgcatccctcgcttcaattcgcttcagcggctcccttcggtcggccccagaccaacctctcgccggtcgtccaaggctgccggcactgccgccgccaccatcccttcctaccagccccggcctgcggccggacccgacgcttcgcacgtcgagccgaccttcctctctgccgcgacgctgatcgaagctgcggcggggttgctctcggcctcctcgccgttgtcgtccctgcccacgtcttcgttcgcgtccgccgccgggccttgatgccctctgttctttctcacaattgttgacaaccattctcccttactgtaggccatacttctcttaacgaccataccatgccctctttctgaagccgccagcgatgtcctctgagtgacaggcgcattcgatacagggtggtgagtggactaacggatgtgctcgctgtgagcgttcagggcgttctgaccgccgagatggatgtagaggacgttggagctcggcgcaatctccttgttcgcaacgagatcgatcagacccgcaagactcttgccctcgtagacgggatccgtgatctgaaagagaagcgtcagcgacgatccagaccatccgcgaaggaggactgacgaaggcgtcgctctcggcgcccatcttgatcgcccggagcgtcgtctcatcggcgaggccatagacaccggcgttccagcggtcgtcgaggatgagctccgactcctcgaccggcggcagaccgagcatagcacatgtcgcctgcgcaatctccatcacctgcgcccgcgtcttctcgaccttgcccgaggcgtcgatcccaatcaccttgcgctggcgcttgccctcggccttttcgagcagcgagccgacgaggattccggcgtgagaagatccggtcacgctgcagacgacgagcgtgtcgaagaagaggccgagcgcctgctcttgcgcctcaatctcgaggagcgagcggagcagcccgcaggcaccgtacttgtggagcgaggcgccggccgggatgtagtacggctttgaaaaggacgacacttagacggggctctaaattcgcaaagtccgggcaggcgcaccttgccgccgttggccttgacgctttcaacagcgttggcgagcgacgattggccctcgatcgtgaacccggccggcgcgaggcggacgtcgccgcccatgagccgtgacagctgcgtacaagcacaaagcgaaaaaggcatcagtcaaagtccgacctgtcggcttgatgaaggcgaccaacctgaatgttgccgacggagccgtacactgccttctcgtgctcggtgaaggcgatcgtgccgggatagccgtcaagcggcacccatgcttcctggacggtgacggccttgagtccgttcgctacggcgacggccgtgacggcccgggtgtggtctgcgagcgacacgaaaggcttcagcaggtgagggcgtgcgaggctgactcgaagcagagacgcactcgactggatcccgccgatgctgacgagcgtgtcgcagccatgctgaagggcgtcggctaccaggtactcgagctgatcagattcaggcggcagatcagctcgggttgagtcagtttggcaggcggcaggcggcaggcggcacaccttcttgacctgctccatcgtgcgtttcggcgtcagcaccagctgaagtcgccttgactcgcggccagactcgccttgtttcccccgccagccaacggcgagttcaggtcctcgcgcttggcgtagatggctgcgcccccgagccgggccgtcagccgctcgagcttgtggatgtgcgatgggccggggaaggtgagctgcgtgcgtgggagggcgtcgaagatctcgcgcggggagggcatgcttgtggatgaggttgaggtgtgaggagaggaggaggaggaggccgtcagctgagagctggcctgaccaagctctcctcccgaagagcgaagacgaggaggcaagatgccggaccgtcggcgagatgcggtcgggtgcctcccagccatcgcccgcggccaactcgtccacgccggagcgataagctcgacgcaaacagacgagagcgccgctcttgaactcagctgagccggcgtccggatgacgacctcggatccgacagagcgcagacctctcggcctgcaagaaaagggtcgaccaacgcggcagcctccaagggagtcggtgcgaacgaagatgggcgccatcgagctgcgcgcggaagattgaggttgaccgctgctgctccgagcttgtcgagggtcggcggtcgcctggaccggccgagctgctgctgcggtaggagcccatctgctgggggcgccagcgtgtgctcagctgatgttaataagagtagagcgcctggtcggccagtgaagagctcagtctctgctgggagctgcggcaagccgaccgctgcaagtcgatgtggacgctccgtgctctttgtgaccagcattagcgaaaattcaagactgattcggctgactgcaggctggcagtcggcttagacctcttgctgctgacagctgaaggtgagaaagaggtcagcctgcggtgtcgaagggaaggctcgagctcgaagcgcgtcgcccaagcactggagtgctcggatccaccgcttgacacgcacaataccgccggctctctcgcaacggcgggttagatgccaggactgagcagccgcacttctgagccgtccagctatgagcaggtcgtgtgtgcaagagtgccgggcgagctcgctgtttgagcttccctcgcggccgacgcgcctcccgccggccgccctttgtcgcgcgagcgcaggcggcgttgctttcagcccaccgaccttcagcatcgacaacaccgccaggccgcccttccgtcctccttcttctcctagcctagctagagtaacggccagcccgaccggatcagccagtcagcctttgacgaccttcgcttttttctaccggacgaccgccgatcgaccgccttcgaccgagctctcccgcctcggccgccttctcactctccccgtcgacctccttcctttggctacccgctctctccactcttatgcgtcccaatggcggacctgcctcgcgcggtggcagtaagtccctccgcagcctgattcttcacgctggcaacaaaagctctcttgctgacgttcgctcgtcgatcgacctctacgcggtaccagtgctccagcgcttgacgatgctcggcgagggcggcgtcggtaagacggcgctcacgacccagttcaccagcaaccagtttgtcgaggtcagtgtgggcctggccaggtcggcgacatgtgggtccgaagctgacctctcgagctgtctcgctcgtcaatgcgtccgctaggcatacgacccggtgcgtccagctcgcactcgcctcgagctcggtcatccgtgtgcacacatgctgaacccgtcatgctcacatcctcctccagacgatagaagactgccatcggaagcaatggctgctggatggcgagcaggtgtttgtcgaggtgctcgacacggccggccaaggtccgtctgcgcccgcagctcgactgcacagcttgactaccaagactgacgcccaatcgcccttcgactcggcgccgacgcatacagaggagttcaccgctctgcgaaaccagtggatcaagtgcgtgccgactcggccgccgtagcgctcagcagcgtgcgaccaactgctgatctcagctgccttcaacccttcaccagagacggcgacggcttcctgctcgtctattcgatcgcgtcggcggcttgtacgtcgtactgctgtccttctgcatcgggtcggctggaccgaacctggtctgaccgctgcttcttcccacagcctatcaccgagtggccgacctccacgagcgcatcgttcagatcaaacgccagctcgggatcgacaacccgtgcgtcgtgctcgtcggcaacaagtgcgacaggcaagaccgcgaggtctcgttcgaggccggccagacgctcgctcagcggctcggcatccctcacttttatgaggtccgtcttccaccggtctctacagccggcacccttgccgcccagtgagctaacacggcgctcgccccggctgcagacgtcggcgcgcagcaatcacaacgtccaagaggcgtttcacacgctgacgcgggccgtcctcgcgagtaagaacctctcgcccgtcgcggcgccgggcgccaacggcggtgttactccgcggaggcgcaagaagcggagcggttgcacgattctctagcgcgcagtcccgcattcgtgcgtcgagcttctgtatccgtgccggttggctgccaccaagctgacgagtcagctattcctgcctccaagcatgctatcctccttcccatgctccaatgcccttccgacttgtacacattgccgcccgccccttcaaacctctgcagtaatgacatcctccagcgccctcaagcccctcctcagccgtatcccctcatcgcatccatgtcgacctagactaagccctttttcctgtgcgccccggctttccccagacgaatttcatgacacctgccctttggccaccttgcgccatgccgcagtagcaagcagatcaggtcaatacaaagcataggcctacaacacgtgatgccggcgctctactgggcgagaactctagagctctacgaggcccttgcgctcgggcttcaaaagcatgcgcttcgtccagtgccggatgatgagcttgcccttgccgtggtccggaaacttaatcggatcgcggccaatgatcgcggcgtgcgagttgaatgagtccggcatccaggcaaagtgctgggcagcggaagtcgaaggtcagcggtcgaagtcgctcagtcagatcaccaaacgaggcgcaccttctcgaggttcggcagctggtcgagcgaccggatcatcgcccgctggctctcggtcaggcggaggccgctcaccggctggcccttggccgacaggactggcgtgccagcgtcgtccgcctcgacccttgcaaagccgtcctcgagctcggtctcgagcgcctgctcgacctcgcggatccgggcccagaggctctcactgtcggccccttcgagccgcttacgcgagcgccggctctcgcgcccaaagcggtagaggacgagcgagagcgcgagcggcaagagcagcgggaggacgcagtagaagagaatgttgagcgggaagcggaagcgcaggaagggcggcagccggtgccgctttggcggcttgacggcaggccgcgtctttgcgtccggcgagtggccgttccgtttcacctcgtttgaggtcaaagtggaggacgaggcctcaccagctgtcggccggcgccacgacttgaggatcggcgcatcttcctcggtctcactggcggtaagaaggtcgctcatcagccactcggattcaccgtcggacgctgaaaagagcgcgccgacgcacacgatgagcccctcccagtcttcaaaagggtcaacctcgctgaaagcaccagacggaaacggcaccgtccgatcattttgtgcgctcgcgtaaacgtcgacgcgctcgaacagctccagggccttgtagaagacgtcgtctgcgagagcgagcgagggcgacaggtgtaagcaagggccaagtgcgcagccgcggccataacggagcctcacccttgcgcgcgagccgtgcaacgagctgctccttgtcgacgcagaaaagctgctcgcccgagcgcgagatgaagcgcgagccgacgatcgtgaagagccggttgaatagggtggcatagcgcaggctgccgatccaaggactcgcgaatgtggcgaaacacagcggcttgtggtgctcgaagaaggtcggccgcgagtagagaatgccgagcgcgtagcgggcgacgactggagggttgcaagcgaggttgtctatcagcgtgtgcggcagtctctcggaatagaggatggttacgtacgcccgccgagactgtaccctgagagcgagagatacttgacctcaagcccttcttcctgctcgagccgcgcaatctcggcatcgagctcctcgacgacgcgcgaggcattgatgtcgatcccgtcgtacgtcttgtcgttctggttgcccttgacacgaaggatgcgcacgtcgacgtccggcaagctcgcttcgcctccgttgagggtgctgctgctgctcgacgctccatcagtgggtgaggagctcgcctggccgccgaacgactcgagcaggacgtcctccatgctctggaggtgcgtgacgtcgccccataggccgtggacgagcacgatgatgtggacgggccgtggcatcggaggcggcgggttgggtgcgcttgagcttgagcgagggctgagcgagctgaggctgcgggtggtgcaggtctcgatccgggcgcaagatcggaaggtgggcgtgcgtgctgccgagagggacgagctgagatagaggagcgggagctggtggttatgggtagggtcactgtcggtgtcgactgagcgacctctttcagccgacattcggccaggccgacgggcatcggacgcggccgacgcggtgacgcgtacgcagccagcatggccgaggccgaactgagagtacgtccgcggccccagatcgtcagaaaggcattcgtagcaaggcgagcagggcgagacaaggaagaacgtaggcttgtaggcgaggagagggcgtcatgagaaaggaggtttcgtgggcgggtagattacgtttgaagcagagcagaaggtaggggttacaattccggtggcgaatgaagggaatgaaggatgctaggcaaagaggccacggaagcgggcagcgacgctcatcaggagcggcagagggtcgaccgccgacgtcgccgtcgctcggaggccgttgacgagcttactaccgtcgtcgccgagcggccagcgctgctcgtcgatctcttggctcggtgcgtagtagaagccggcgaggaggacgaggtagctgagaaaaggagggggcggggtcagctccgagctagctagactgcagagcggcagcgtcaggcactgacgcgaggatcaggatcgagccgcgatgatagttggcccgggcctcaatgtaggtgtacgtcagcaggaaaatcgagaacatgatgctgatgcagtcaaactgcggcaggatcaggctgagaggagaagaacggttcagcctcgagacatcggcaatagacaaaagagcgaggacgcacgtgaaggtgtcgacatactcgcccatcttggaaggatcatagatggccgagaaggcgaccatggccggaatctggagcaggcaaacctgcagggcgtaggccgagccgatctccatcctgcaaaagcagggtctcagcgtcagggcagagtcaggctgaaaagccgattagagggagacctacgagagggcgatgttgccgttgagggcgaacgacatggcgttcataaattcggtcgtgttggggacgagcgcgaacagcgtgacgccgaggaatttctcgtcgatgcccgagccctcgagaatgacgtcgacgacgtcgacgaggatctctgcgggacggacaagaattgtcagcgacggcaacgttcaagcagcagagcaccaggcagacgcaccggcgatgatggcgtagagagccgtgcacgcgagtaggacgctggcactcgtcttgcggtcccacgaagggccctcgtgcccacctccgtgcccgtcgccctcgtggtggacagccgccgagtgaggacgggcggctctggcgattgactgctggtgccgaagcgcgctgaccgtcgcggccgtgacggcctttgcaaagtagtcgtgcgcgacggccgggtcgtcgagcgagagcggcggcatgttcttgacgtccttccggacgatgctctcaacgaagggcgtcagcgtcccgggcatgggcgccgcgtgagcgccggaagcagagccgagcgagtgggcgctgtggctcatcgcgcccggcgggccgatgctctgggccgactcgcggcgcgagacaccgggccgggccggcgccggggatgatgggcggactgtcgaggtcgacgagttgccgtgcgaaggaagcaggtccttcggcgcgaggccgagtgtgcctggcgggagccggttgtggaccgacgcccggtgagccgggtggacggcatgggccgacgtgacgagctcgggctgctgaaggatctgctgcgggttctgccagatctgcgaggcgtgcgtcttgagcgagaaccagaggccgatcaggtacgactacgaggagggatcgatcggcagtgagtcgttagcttcggtcttcttaggtttttacgcgaggcaacgactcacgagcagcaggaggctcgcgcagatgtacatgaggttcttcacgcggtcctggtagaatgggtccttggccgggtcggggtggacgtagcggcagctgtggcacatccagggctggttgtccggcatgtcgtccggcgaacggccgtccgggcagccagaacagctgagctcgacctgtcgcattggaagagggcgtcagcgttgagcaagctcggctcataacgggctgggagacgcacgctgccgtaagcctggtagaagacggtcggcgtcaagatgccgaggatggccataatgagcatcgtgctcgtcacgcccgcgctctttgcgttgaagctctgctccttgcggcggaaggcgcccgagagcatgctcatgccgggcatgacgaggacgccggcgaggagactgccgacgagcgagccctcgacgagccggcccttgccctgggtcagggcgatcgagtagaggatgatctcgatgatagagccgaacgtcgcgttgatgacggcgcccatcccgatcgacgactgagccgaaatcgaggcgacggccataccgatgaagtagctgagcgggatgaccgaggcgagcgagaggagaaagatgaaaccgcggttggcgagcaggttgaggagccggccgagatcgtgcttctccgagagcggcaggagaacaaaggcgtcaaagatgacgaaaaagacaagcggcagcaggttgacaaagaggatgttgacgccgccgatcgtgtacttaaagtactgggtgccgaccgccttgtacgtgcagagcaggacggtcgacgtcggtccaccggttggcgcgacctgaccggcccggagccgctcgcccttgataaaggcggccggatcgatgctaacctcgtcgctagcggccggctcgggcaggacgaccttcggcgcaggcttgaagccgagctcgagcgggcgcgaccaaaggagcttgagcagggcccacagcagcttggccatggggatcgtgacgatgccgccccagcagaggatgcagacggcgagcatgacgggcgcaagcacgaggatgaacagcggccagaagacgatccggccaaagacgagccagacggtcgtcggagattgaacccccgtcagaaagtcctcagagagcgacgaccggcggtccttgcgtgcctggaacgagccgtagccgttcgtaccgtcgtcgtcccgccctttgcctttggcggccgcgctgtcggcggcgaaggcgacgttggtccgcttggggagcagaggctcgcgttccgtcgacgcaacgttccgcagggttgcattcgagccgccgtcatcagcgtcctcgtcgcgtcgggcacggtccgggagaggcatgacgcggtcggcagcctcctcgtcgcggtcaggcggaccgggcgagccgcgaatcgtcccctccgagtccgactggtcggagacgctggccggcgcgtggtagtaggcggcatggccctcgtcgtcaaagacgtcgagagcctcgccgtcggcattcttggcgccgcgcaggccctcgccctcgacgtacttgccaaacggccagccaatgtaccagccgaggccggcgatcactctggcgtaccggccgcggcctccgccctcgacgcaccagaggacggccgcgaggaggaagcagaggagagcgagccaccagccggcaaagacgatccaggcgaggttgcccggcaggaggtgccgttgagcggcggccgatgggatggcgtgaagcgcactgtcggcttggcgagtgacggtgcgcgacttcttgtagagcgccggcttccagatcggaaggccaaagggatgctcgatgttgatggcctacggaaaaggaggcgtcagtcggagctctctggtctgaagggcgggcgagagcaactcacgtcctgccggtcccggagtgtaagctcgacatcctcgtcggcatcctcgtcctcgtcgccttcatctccgtcttcgaggtcgccatcctcgaggtccgcctcctcatcgagctcctggtcctcgaggatctcgtcgccttcaccctcagcatccttgacgctaccgtgccagctgtggctgagcggctcgccagcgacgctgcccgtctcggacgcatctggctctccttcaaggccgacgatcgacggagcgcgcgagggctcgcgccgaagcgagccgccctcgaatggcccgtgccggacgggcatgaagggcgacgtcggcgtctgggccggctgcgagaagagcgagtcccggtcccgcggcgtcttgctacgtgagacccggcggctctcgttgccaccgccgccgccaccgccggtgctgctcccgatgctcgcgtttgggttgtcgatgaagctctgaccgcggccgagggcggcggcgtgcgctcgacgctcgcgatttcggcgccggatgagctcctcgccgcggtcgagcacgcggacctcgtcgtcgtcttcggcggccgagtggttggccgtcgccgccgtcgtcgtgttgtgccgtcgattggccggccgagcgcgcgacgacgaccgctggcgagacgctgcgccttgcggcgtgccgctaccgagcgtcgacaagcgattagctgacggctggcgggacgtactcgcccgggccgcctgggcgtaggacgagggcggcagcggccgcgtggtcgctgctgcggctcgggcgccggcagcagcgtcgcgctcgcgggcccctgcggcctcgccgccttcctcgtcgccagaggtcgacgagatgaatgaagcggccgacgactggaccgagtgctggtacgggtgaccgctggcgccgctgccggccgggttgagcgaggcgtagggcgacgagccggtcgacgaggtgttttgggcccgtgcggcgtcggccctcagaggggtcgaggcggtcggcatgcctgagcgagttgacggcgaggacggcggccggaggtggtaatcgctctttgcgcgagtcggtgacgacggtggcggtggtcctgcggcggtgcgacgggaggggcttacggttgagcttgggttgctggtgggctgagatccggtcgacgaggcaggaggcggtcgagggtccggcatcgacgaagttcgtccgctcttttcacgcctttgctctggcaagcgagaggagtgggtggctgacggggtaccccttgagtgacgtgggctgtcaggagtagagcagtgacagggaaagttgagcgtggatgagagggaggaggaggcgagcgacaggagaggccgggcgacggcggccgccgctgcgagatgcagcagttggcccgcccacgtgagagaggcaagacggcctgcgaggcaacttcggccagctcagactgatctgtgccggcccctgcacggctgatcgtacaaggtgaccttattctacatgctagcttgtcgagagaagagacgctgtcgtgtcaggtcgttccttgccatgctccggcccttgtctcttgcggcgcgcgtcgtgccgtcgacgcgtcttcctcctccgctcgaccctgaccttcaccttcctgcgacccgctctccttttcgaccgccaaaggacactctacggacctcctagaccgtagcgctgcagctgaagaacccagaaagcgcgctggcaggcttcctcggccgactcgcataattcccagctcgctgccttcgtccggcgagctcagcccgatcctccttgccagcctctcgtcctcctgccggcctggcctcatccagcacctcgtgcgcgtctggaaaccgcccatccaggtcagtccatgtctatctcgctgccggatcacgcgacagactaccggtggctgacgaatggcttgtccttttccggccagcagggcgagtccaagagtacacgtgtcgcccgttcctccaacggtcctccttctctccgccacgagacaaagtcgctcgctccgttaccctaggcgacgacctcggcacttccgtacatgtcgaacaacggcccgaccgcttcgccgatgccgctggtcgacagcatcgaggactggcctgtgagtcgccgcctgcgctcggccctcggcttccttcatcgtgctcgcccttgctcacccgagcctctggctccccctctcgcacagatcggcagctcgatggaggccctcatacgcgctgccgaggtccagcaagctcaggcgatgctgaacagcgcgcaatcgacgagcagcttcccttccggctcggcctcgactacctcagcggcgccggcgcctcaaccccacccgaccgtcgtcgaccaggcggccctcaaccacatcatcaacaatcctcggctcatcgcgctcgtgaccgagcggattgccgcccaggcgagccacgccgccccaccgcccgaaacggtcacgcgcagtgggcggccgtcgcggccggcagccgatgccccagtgtccatcaccgacatctgggcgagcctcaggccgggcgagcttgagcgaatcctgaacgacgcgacgacgctcgcctcgcagtcggagtcatacgacgccttcccgagtcccgcctctgctcctgacgctcgaccgccgcagttcatgctcgacccgcagctcgcggccggcggcgacggcgcgcagacgtttgcgccgacgtcggcgccgatggacctcgacttctggttcagcctccaggaggagggcgaggacgacgacccgacctacgttcctccgtctgacggccacacgccggccgccaagagccagacgcccggcggcggcgtcttcaccttctcgcccgcgggcgacggcgagttcctctcgtcgattggcctcaacccggacgggacgacaccgggcgccagttctggccaggagacgacgtcggccctatacgcagcggcatcgccggccgcgacgtcgctcatagagctcgccgcctcgccagggccgttcggccggccgtcgcccggtgtcttgcggcttcacccgaacgcggcccatggcttggctccgtcgccctcgcctttggccaacccgggctcgatctcatcggcaccgcaagaacgctcgcttcgggtccgcaaaaaggtgcggcttgaggagccaaagtcgcccggcccttcggtggcagcaacggcagccaagggcaagggcagggcgagcagcgtcgccggcggcacctctgtcgcaggcacgtcggctggaggctcggccgacgagggcaaaagtggctcaacctcggctggtcctggagacggcaagccgcccggcaagaggcggggccgcgcgcccgtcctcaccaaagaggagagtgcggcccgtcggagcgagcgaaacaaggcatcaggtgcgtctgccctttgcggcatgcgagcgagattgcttgctgactgtttgtaacagcactggcgagccgaatccgcgcaaaaaaggtcgttgaggacctcgagacgcaagtggcccagctcacggccaaggtgacgatgctcgagggcgagcttcaggcgacgcgaaaggagtacgtcccggcagctgcaactgccggtcgacctcttgctaacctattggccgcgctcggcttcctttcaaagactccagaaggccaggcagtcgaggccgtcgtacgtcgccgacacggtcgtctactacaatacgccgaacatctacgaagcgggcgaggacggcgtcgcgccagatcacccgttcgcccatctccctcccactccggtcaagccgagtcgcaagcgtggacggccgcgcaagagcaaggagggggacgagggtgaggcgaaagagaaggacgagagcaggagcaagggcaaaggcaagtctgcctttgctgctgctcccaaggcggccgtcgtcagcaatggtactctcgcccctttaaattccgccgtgtcgaagacttccgccgccgccgccgacgctgccgaaggaccgacctcgcaggcggttgctcctgtcgacgacgaggaggaggcgcagttcaccgacggcgaggcggagagctcgtcccatgacggcgacaccgaggaggacgtcgacatggacgacccggatgacggcgactttgtcgagacggctgtcctcgttccgccagtttctcctcgctttgccgtcccgtcggtcgtggccgctgtgccgccgagctcgcccgcctcgacatcgaccgtcgtccctgacgccgcttccgacaagaagaagctcgcgccgccctctccgcccgccgcagcatcgagcgccccgtcaagcacgccggcgaccggtgctcacccgccctcgacgtccgacgtctccgactcgtcgggcgacgaggacgacccgtcgtccgaccgcgacccagactctgactttgatccgaccgaggacctctacctgccgatccgggatgtcccgcacccaggtccatcgccagacagtccgccccgctcagtagcaggcccgtccttggcgaccttgctggcgagccctgctcggacggtcgtgggccgaccgggcgtcccgccgagcccgctcggcaacgtcgacaagaccgaggtcgtcgacctgctcaagcagctgctcgccaagatgggcggcggcgctggggctggtagcagcagcactagcttgtagacctctctcctttcttcttgtatggacccgttctcccccccggcttgtatgcgcatgacgccggcgtcccgtccgcgcggcgtcctgggagaaaggggtaagtgtttcagcgtcctcgaaccccctctccctccctacttctgttttgctcgcggaggtgccgtgaacgacaggcgcacataagctctaatggtgaagtatgagagatgctgctgcccttcctatcggtggtcgccaggccggaaggggctgagggacggacgtgggtgcgagcaacggggcgaaggcgctgcgccgcatgacgtcggccgcccgctcataagggcgaccgtcgcccgcctcgtcggttaccacccaaccacgacctcaccctcttcgcaccttgaacatctcctcctcttccatccatccaacaatgcccttcaaagtcggcgagaagatcacgtacgccgtcggagccaacgaggttcccggcacaatcagtgccattctcaaggacaagacgggtgcgaaccctcgcctcctctctcctttgcccttacgatgcctccaccgtagaacatgccagggctgacttgccttgctccggcctctctctccctgtcgctagccgacggcgagaccaagtactcggtaacgagtaagtggcccctctctccacctctctccctcctccagctcagggctcgctgcctcgcaccgaccccttgatcctcgcgcgttccaagcagtcacatttgctgacaccccttccggcttccattccaatcctctgctggcgcagacgataacacgggcaaagacgtctcgcgcaaggtccgtctctccctggcctacactccaccgcgctgctgcctcctctcgagcaagcgcggacagagggggtcgtcgatagctcgacctgtccctcctcttcccagcgccggcgtaaaactgactcatcccctcttcttgccttttcacccttcccctttgcccttgccggccttacaggagtcgactattcacaaggcctgagcgaggcatcgcgtcggccgtctccagcccaactagctctcggtcgagtctcggctcctccttcagctgggcccctgtcgctggccgcatgagtccgagccgtctatgcagtcagtcgcccgtttgctctaaatgcgcgctcagtgacgagcccgagctgaccctctttcctcctttctcctttcattccctctcgcccatccacctcctctcggctctcgtccctcgtcagtcttcttttatcttcgagacgtcttgagttaagtgttggccggcgggggtctggcgcgagcggagcggtcaatcatgtcatacaatcatctttcaacgaccggcagcaagctgtcgataacaagctctgcgagcgagaaatggctgaacatctgcagaacgacatggctagagagatcgagatgagtgcgagccgggcgaggagaggagaaggtggctgtacaacgaaaggagtaggaattccggcagattggacgatggacgtcgaggtacaagggaggcacggcgaaatgtctaagaagaaagagagatgaggggaggctagatcaaagagcgcaagcgtccctataggacggcgacgccatggacgccgacagaggtcgcctctttgtccttctcggacgacgcatccccctcgtcgacaggcctggccttctcgacgtctgcgtcgtcggttttcgtcttcggcagacagtcctcgggatgcgcgtagatcgcctctgggacgtgtgattcgccgtctttgaagacaagcgagaggagcgtgtaggcgaggccggccgaggtgaaggagaagagccaggtctgccggtgagcgcacacaagtgcagatgtcagtggccgaacgggagagggtggagggcaggccaagccgacgtaccacggcgtacaggttctgaaggccttgggagatgacgatctttgtgttgatggacttgacgagcccaggtagggtcggcgtgaccgtcagcaggagcgtgacgagcgcccgccagttgacgccggccgtgtagtaatagcgcccctcgcctccgaggtaaagcgagggcacgtcgatccggcctcggcggaggatccagaagtcggcgacgaggatgccgacgatcgggccgaggaagcttgtgtagccggccatgaacgagaggaagttttgggcgttggcgaggatctcccaaggggccatgcaccagccgccgatcagggagacaaggatcgaaccgcgccggatctgacgttgagtgggtgcaggagggtgatcaggagagctgaagatcttagagatatgagggagacgcacattgaaccagcgagggaagagggcgcaaaggtcgttggccgcagagacggaattggccgagacgttagtgccgatggtggcaaaggcaaagctcagcgcgcataagaagcgcgccgcccggcctttcccgtcgtcgccaaagtggtcgatcaagaggagcgggttccactcgagctcgccgccgtagaccacctgggcgccgctcgagacgacaatgcctgcgacgtccaaggagcaaggggtcagcaagcctacgctgacagtgcgtctccgcgcgattgcgtacccaggaaggccgttagcgtgaaaacgactgggatctagagagggacagtgcgggtcagcctctgcagcgagtctggatgaggcgcatcagactgacgacggccaattggatgaagctagcgttcttgctgaccgagtagcgacctaagaaggtccgcaaacagtcggtcagtgtcaggcaggttgtaggacaggggacgacatttactaaagtcggccacattgacagactacagaaacgggaaggatgattagttgtcaagcgaggggatctggaggactggacccagctagctcaccagcgtcgcaaagttcccaatcgtagagttcaggcacgacatgaaggcccagccgagggacgagccagaaattgtcgtgggccggttgaagatctcgcccttgcctcctttgacgagggcccagataaagagcgaaatgaagcacgtcgggacgaggaccgccttggcgacgaagaaccagcgtaggcgcgacgggtggatcaggaggaaggggaactggaagagccagtagagaaagaagcagagcataccgctgctcgagatgccggccgaatcggggaggttgttggggaagtcgcggaacgagggcgaccatgagacgatgatctggtaaaagcactgttgagtggaggcgtctcagctttgtgcgtcaagcgtcaacgcgagcctacctcccgagacgaacctggcctccggtgtaggtttggacgccgaaccagaagagagccaagaccaagcgacttgcgatagcgaacttgctgaggtgcaggccgaaagacgagcgactctggaccgggaacgggacccggaggagggcacctgtcgcgccttgaagggtaatcggaatggctatgatgaaatgaccgaggacgatggcagggatcgcgtacttcatcgacagaccgacggcctgagaaagacggtgcgaagggggcgccgataagcaggtgctcgggaggcggacgaagccgcagatagctccgcgcgcgcaccaagaaggagctgcccatctcccacgtcgaaatgttcagaccatccgagatccagtagaggatgaagtctgtgagctctgggtcagccattgcctctcctgagagtagctccttgccctgccctgagagacgggcgttaagagtcgagcaggagctctcagcaggctcgactgacctcgacgcgaccaggttcgttgctctgcacgcgtacgctcggtcagccgagtcggttctgacctcgtcaggtgtgccagacgcaccaggtggtgtcgggtcaaggtctttgttcgaggttccgatcttggcgactacaggaagcgacaagcgcgagcgaacaaggatcagctcggcgaacgccgctgacctcgaagcgcgcgtcgaaagggacgaacaggcagacggctcgggtgtgagctcccatcgctttagactggcgagcatgggtgaaggtaaggatgagaggagggtgtcgagcagaaaaggtgctttcaggcggcctcctcggtttcaggcccaagagataacaactggccagagaactttaaaaagggtcggccatggggatcatggattcgttgacacgcagagtagcaagccaagctgcaccgcccaaaggtgcagccctgctgccccggcacctcagtcgccatggacgagtgccgcgagtacgatcggcgtcaccatccctgcgataagcaccgccagccgcgaggccttcgagagctcggccgcgctgtcgtcagggtgcgacggcgctggcgcattaatgtcttggataactgcgagaggacaggagcgatgatcagtcgggcgaacgtcaggtctgcaagtaagtcgatgggccgtaccagtcgcgacgtagaggaaagtccctccctgcaagcgaggaagaagagcagcgcgcgacaacagttagtcagcgcatgctggccaataccggcagcaaagaacgtacagagaaggtgagggcgattcctgaggcgagcagaggtgggtcagcccagcgaagcgaggtgtggaaggacggcagtgcgacgaaccggtccagtactgcagcgcattctcattcagaacgcggccgatgagattgacgagcgcgtaagtcagaaaggcgccggctggtgcggcggccgcgaacgctgcgacaccccatcgaacgagcgccctagggaggccgtctgcctggagcgtcgtgcagagaccgacctggttggcaaagcagcgagggtcagactctggatatgtgaccgcctcttgcgcgccgcgatcgctcaccgaggcggggatcttatggatcatgatggcgagaaagacgacgataccgaggtcgccgtcgccgctccttgccgatgcgccgagagcgatgccgtccgccaagctgcagcgcagagggttacatgagcgagcggtcagacacgacacatcaacgcgacgcgcacccgacgcacctgtggacgacgagtgcaaagacggcgctcgcagactttgggtgctgggctagcgcgctgcgccaatgccagccgccagtggcggccgacgcgccgttctcgccggacgctcgcggactcagctgcggcgtgacgtcacccgagaggtcggcctcctcgtcgacctcgtccgtcaaggtattgagcgacggccggcgctggaggtgatgccagtcggcgcggtcctgctcgggaaggagcgggatcgtggactgctggcgcgacggcgtcggctggaccggcccgccggaggccgacgacgcgctcgggccagacgacgacgacggagactcgtgcgcgtgcgtccactgctcgatgagcagcatcaggacgaagccggttatgagtgagaggccgatcgcctgcgacaggtcgccgccgccgccctcgtcgtcgtcgtcgtccttgtcgtcgtcatcatcgtcatcgtcgtcgtcatccctgcgctgaccggtgcgtaccggcagcgtgtcggcaagaggcgagaagacgtcgagctgcaaagagtcggccgagcgaacagagaggtcgacgtcgcgcgtcacgaccgtctgcgccgtccgaatgaggctcggagcgagcgcgtggctgttgtggcttgggcacttgtgagcgctcgccgtcgacgcgtagagggtcgagacgccctctgggatgatgatcgtcagggcggcgccgacgagcaggcccttgccgtacgtgcttgtaaccttgagcttgcggccgctcgcgatggacgagaaccagagcggcgccgtgccgacaatgtaggccccgccgccgacggcctgaggatacactcgttagcctctggcaggacagcaaggcgagggcgcgagagagacgtacggcggcttggaagagaaggttcgcgagacccatccgtgcgtcgcgaggccaggagctcgagcagaagagcgaaggagggcggtgagctgcggggccgatgacgaggctgctgcagtcgagtcagccttctactctgtccgcctggcccaccttcggcgagaggccgtaccttgggagagagtagaggacgtgacaggacaggaatggagagacgcgacagcccttgccatgggttccgctgcgacctcgtcgggctcggcggcggcgaggtcgggccagtcgcgaaggcacgggcgcagcacagcaccggcggcaacagcagcagcagcagcagcagcagcagctcggattcccttcaagaagcagctcctccagaggtagagggttcagacgcgagctctgggtcgcccttccgttcagacatgtattcgtgccgagcagagggggttcacgacgactatcgtgccacgagcctctgggtctagtcgcgtcgagctcgccttggtgccgaccctctgacgctcatcaactctgacgctccagtctcctcttcgctcgaacgactcgccgcaagatcgcctcaaaacgatccagcacggcgtcgagttagagctgagatgacgccgacgaccgcccccgccgcaaaggaggtcgaccgtcttgacgagctgtacgatccaatggaagagagcgacttcgagcagctggttcgtccgaccgaaacccctttcgagctggtcgacgaagctgaagcatgccatcatgcagctacacgattcggacggcctgcagacagccttcggggatatcctcttcggtcgggacattgcggctccgacagtatcagactgccgggacaggctgagcagcgacggctggtcgtccggccgctcgtcgcccgactactcgtcttcggagagcccggttgctgagggccctcttgagacaatgcggtccgccgtcgaaccgcccctgccttcgcttccactcgagctgcaggccgccataattctcgaggcgtcgtcccttacgccatcgccgtaccaaggcgacgacctcggcgcgctcctcgctcgacagtcgttccttgcacgcgcgtgctgcgtttgctccgcctggcaggtgcgtgcaggtcatctcggatcgactcggacaccgatttgcgaaccctgctgaatctttcgcctactgatccgcttgcgtcttgcggcaggagatggccgagccgctcctctacgcctggccgcgcgtcaagctccacactatggcgcgcaaccacctgtattctggtcgcacagacggcctctcccaggagctcgactggcacccacgtctacagatctttctcgctgcgcttctcgcgagcaaggaacggtatttcacgcaagactcggaggtcccggtcgcgctcaacctgcgcatcaaccacaccacgatgccgcgggccgggtttgtccagccaaccaaggtcgtcaagtcaggagcctaccggagcggcctcctcatccacgacgacatcaaggacagaggcgacaaggctcgcttgcgcggtctgtctgttgaaacactgacgctcgatggcgactacgatgccgatctctccgaggcgctccggtatgtgtccctcgctctcgccgttgcgttcaccccaactaggctcacggtctgactctcgctcatttttctcagcttcgtcgagtactgtgacctgcgcgacctcgagcagttgcacctcagagggcgtgtcggcctcgaggccgtccttgacgacgtctttacccgatgggcgctctgggcgccgctcaagcatttcagcgaccttcggctccagtgcgtcctgacggtcgacgtcgtcgacgccctggagggtgcgctcaagcagatcggccctcagctgcggacctttcacctccagccgtcagacgacgcctggatccctcgccacctgctcgacggcctcgatcggctcgagctactcgcgctcaacacccgcagctgcgcctttctgttcgacaagggccggctgccgcggctcaagcacctctttctcggccaaccgaaacgcagcggcccgatggactcgctcacgaccgggcgctccaagctcctcttcaacgaacgcgtcgacgacatcgtcaagcacgtcccggctgatggccgccgccgccttcatgtcgggctctggcagctctcgttcaagctcgagtgcgtctgttctgccgctcctgcgtcttgagtgtgcccgagatcctgacaatgtcgtcaatcgaccccttcagacaacacaagtggtcacacactgtcatcgctgcgcacgaccgactgcagcgttgcggcctcaccctcgtcgaccgccacgcgcaggagctcgcttgcgattgacggatccggcagcatcccgccttcctttgacgctccctcttgatcgccgtcgtgctctttcgaggaccgaggtggcgaccttgtgccggcaacgtccgtgcaaggtgcggcggcagcggtgatcgcgaggcgggcgcgcggcgggcggagaggcaccttctaccaccctcttctcgcacagagccccctccggaagtattcaatgtccccgatatgagcatccgaagctgtcttggccttcgtgacttgaacgagatcagctcaatgtcgagcaaagcgtgccacgtcacgctgcgaggtcgggtcttgctgctactgcgccgtctctcgccgcctccaagacggcccgccgacctcgcgctccagagccgtcccgacagccatcaccgactctctttctgctctcatctctcgccatgcggctctcgctccttcctctcctcgctctctcgtcttcggtcctggtagccgccacgcctgagctcgccgctccgcacctcaaggccggccaggcagcactcgcctccggccaatatctcgacgcctcccgggccttcacggaagctctcggtcagtctctcgtctttagccaggtcggcgagctagtcggactgacagctccatcgcgacattagagcacgacaagagctatgttacgctttacaagcgggcgactgccttcctcagcatgggccgcaccggagctgccctcgacgacttcgacgccatcctcgagctcaacccgtccttcgcaaaggtccgtttgctcgagctacctcagctctcatcagtagctgatttgatctctcgttgctgcctgctcgacaggccaacctcgagaaggccaaagttcaggtcaaggagggctcgttcgcggccgctcgggcgagcctccaggcttacctgaagagcaagccgaccgacggaattgcaaccgatctggtacgtctgatgccctgtcgagctcagcagtagctcccagtgtttaccttgcgttcacgcccgtctgcacagctcgcttcggtcaatgctgccgagacggcgctggccaccgcccgcaaggcactcaagaagcacgattacgagagctgcgtcgtgcaggcgacgaccgtgctcgacgcgagcccgaatctcgtcgaggcccgtgagatccgctccgactgcttctttggcaagggcgatatcgacgacggaattggagagttgacgtgcgtccaagccggcagacggcgcccttttggtccccttcgctgaccatcctgtgctgctgcggtccagtcggctggccatgctcaacccttcctccgcgccgctctcgatcctggtctccacgctctctttcttcttcgtcactcgtacgtgcttcgtctggcgtatcgcgcatccacccttccttggcagtctactgaccgccgtcatctttcctccgccctgcgtgcagcttcacaagcactgccgcaactcaagcagtgccttcactacgatcccgactcttcctcttgcaagaatgcacaccgcgtcctcaagggtcttgtcaagagcatcacccagatcgacaactttgtcgccggcagcgcctggcgctcggccgtcaaccacctcgtcggcacgccgtccaagccgtccgtcattgaggcctttgacgagacgctcgcctcgtaccgattgtctttcccggctgcgctctcgacgccagctgcgctgcggctcagcgagccccggcgcaagctgtactctgcagcgtgcaaggcgctcaccgagctcggcgagacgagcaaggctcagccttactgcgacgagacgctcctcatgaaggccgacgacgtcgacggtctcgtcggccgtgccgagagtctgatgaaggccgaggattgggaggcggcagttcgtgccttggatcaggcgttcgaggccaccggtcgcagcagtcaggacgtgagtagtcgcgctccctctcgtcctctcgtcgtcttccatctacacgctgacaggcgccctccatcaggtcatgaaccggctgcaaaaggcgcagcggcttctcaagcagtcgaaggcgaaggactactataaggtgggtctgatcgcggatacccgaaagcatgagcattgactgacggcgctaccggttctcccctctcacccaggtcatcggcgtctcccgcgacgccgacgcgaggacgattaagcgggcttaccggaaggcggccaagacggctcaccctgacaagggcggtagcgaggccaagatggccgcgctcaacgaggcctacgaggtcctctccaaccctggtgcgtcgtccgtgcgcacagtgggcagccaaccaacaaccttttgacgttgctcctgacgctctgcctgcttcgtagagctcaaggcccggttcgacaacggcgacgacccgaacgacaccgccagccagggccatggtggccacggcggcaacccctttgcccaccacggaggcaatcccttcggccagttcttccagcagcagggcggcggcggcttccaccatcagggcggcttcaggcagtcgcaccaggagttcaagttcaacttccagtgatttacccgacaagccgcccgtgatcgtgcgaggagggggattgtatgtctttctttctagtgcgcggtcaagtcatggtagtggcagttccgagggctgggcgtcgagcgtcgagagagcgactttcatcttctcgacctcccacgagaggacgaccgggaacttcctcgcaaactcggcttcctcggcgtgttgatgcgcctcagtgagtgcgaggccgcctttcttccaccggcgcgcccggctctccttgcgcttgagccaggcggccatcccttcgagccgggccgctttctcggccggcggttcctcggtgtcaccttggacgagcgtgatgaccctgccacccgcctcatcgccgccggtaatggaattcagccgggcgagtcgaccggcaatgtggacgtaatcggccgcaccagcaatcgccccgcccgtcgtgtagatcgtcgtcaggtcggcaaagtcgagccctcggcacgagacggtgtcggtgatgaggagggtgcccacagcagcagcctcgtccttccaacgcgccgtgataggaagcgtccgggccgagataccagcctcggctagccgactgcgagcgtcttcgacggccgcctggtcgcggaggacgagcagcgaccggccggtcgcgggcgcttcgccgctgacggtcgacttgtagagtgacttgaaggcgtcgaggatcggggagggaacccgagtcgagggccggccgtctacatcaacttcggaaggcggataggactcgaggtcacgcccgagcggggctggagcagtgaggttgcggacgttgccagagggcgagacgacgaggacgtggtgggcgatccggtcgagctcgggagtgtggtacgtcgttgattctgggagcttgccgccccagacgatgcgagaccaggctttcatgggcgtcccgtcggtcttgtcaccttctttcaagccctggtagatgacgtcgaccgctgggctgacaatttgggtcgtctccttgaggtatcgcatgatggtcgggctgacggtcgagccgacggcgatcacttggggcttgcggcgctccgggttcttgctcaacgagtgctggaagccgctcgtcaacatcttcttgatcgccgtcatcgcctcctttcgccgagttcgcgcgtcaaaaaagacgtcggcctcgtcgatcgcgagcgtctggagggcaagcgcccgcatcggcgcgacgctctctgccgtcacagcatcgtttgtcgtaaggacgatgttcggcggctgcaatcgcttggggaacggcaggtgcgaggccgggtcaaagtactggatcgtctgctcgagctgttccggcggaaccatgagcgccgcccactccatcacctggcgggcgagcgcgtcggtcgggacgatcatgagcgcggccgattggggagccttgaggcctggaatcttggtcgtgcgccgctcgagtgtgagaagagcgagcaagatagagaacgtcctgcagcaaggtgcgggccagccttcgtcagcgcttctcctcatttaaagaagggaccaggctggctcgcagactcacttgccgctgccggtcgcctgctgcgcaatgacgtcgtgcccggtcgcgactttcgacagcaactgccgctggaacttggtcggctcctcgatgtgcgggaagttggtggagatcaaggcggcaacttcatcacggacgttgagaccctgcagcagaagcggtccatcagcgggtcaggattgagcgatcatcgcacgaaatgcgcgccagacgtacgaggaagcgtgcgaccgacttcttgccgccggccgcaggaggaaagtgcccagagtgtttggtctcctggcgcttcatcgcctgctcctcccatcgcctcagcctcgcctcgtcaccctcgacggcaccctcgtccggaaagtcgaacgagttgtcctcgacttctatcggcttgggacgccgctcgaccggcctgggctcgtgccgctcgcgcggtttgggtaccgctgcctcaaaggagtctgtgtcgaagctgaagccaggagaggcgggtcccgtgggctccgaccttggcgccgacttcttccctccaagctcggccgccgccttctcgtccacctcgcgcttcatctcggccatccggagccggctggcctcgagccggtcgacctgcgccagctggccccagattttcgggtcctccgtcctctccctcttcttgaacctctcgaccgccggcttgtcctcgtaccgctcttcgtctggccgattcggcgagcggtacgccagaggcctcgacggtggcggggcgtagccggggacgtcgaaccggtcgtcaatcgtgtactcgggctccttcgatttcggggcgcgccggaacctatggacaccgtcgagcgcgtcctcgacagccggaccgagctgggcaacacgagcctcgagccgagcaggccggtctcgcctggaggctgctggccggtcgtaactcctggaccccgaggccggacgtacatcggcgtcgcgcgatggccagtcgtcacgcgatggccggtcgtcacgccaacgtccggggccgtcctcgaccagtggtcgccgggcgtacgccgtcccacgcgaggagccgagctcctgctcacgcgaacgaccgccattgatcccaacatctgagcgctgccggtagtcgtcgggccttgcgctcgcgtcaaaggtcgagaagatcacccgtgagtctgtcgaggtcggcgccggctgccgcctgacacgctcgcgcagtgcccgggcctcagcctcgaccgcgcggaacgggtccggctttggcgtcgccggcgcgtccatcgtcgctgggccgatatacgacgtctcgccttcggttggctttcgcagtcgcggatctcgaggcaggccgcttgagagcgggacgggcggcgcctcgggcatgagctcaaagatggtccgtgccttcctcgttggcgaggctcgaagcttgctcggcgggggagtgtcggagacaggcggcgggctgtagaaggccttgagcggcttgaggctgggtgctgccttggttgagctagagccgaggaaagggaggaaggtgcgagagagcgacggaagcaggcaggcagcgagaaaggagtcgcgaggtgacaaagggaatcagaggacgccacgaagcggacgacgagggaagcttgagagtcagcttcttcaagcttgttgcaagcagcgacgagagaagcgcttgtcgaacacgtacgcgctaccggtcgagccatcgaacgggccactgctgctgctgctgctgctgctggcaggagctgcgcctgacgaggccctcgggacggaggcggcgagcgaccggcgctgatggccgctcgcggcgagcgcggcgacgagcctcgcggcatcgccggccgtcgagttccggcttgcgctgctgctccggcgggcgagcgagagccggacaaggctcatcgaggtgcttcagagagggcttcttgatggtctcgagtcgtctgtcgtctggccgtcgtagtcgcgcttggtcgactttcgggtggaggccatgcacgacggcgagggacgatgtagattgacggaccctgaacccctcggactcccagctgcggcatgcgggcctgaacgaccaaccgacgcctgacgacgacctgtcgtccatcaacagcaacagcagcagctttcgctagactgctcggtccgaagctgactgctgacagcgtgatctccctcccgcgccgttcgggcccgctgccccgtcaggcttgcaatagttcgtcgatggacaggccgctccaaatgctcgccgcaaggcccgccacggctgccccgcccgtccgatcttcagccgccctgtacatgcacacctcgcctccaaccgccggagtatttcggtctcatctccgccctcggacggccgtcggctcccgccctcgagctcgcgtgcgagcgcagacggccccgttccctcgggcgtcatcggctcctgctcgcgttggcagggatcaggcctccggccggggacgaggtctgacgggtctcgatgtggctggcgcagccagcagggcgacgaagcacaaaccagccaaggtagatcggttcgaagagctccgaagtcgaggagctctcttccaccgtgcacgatcatcggccgagctcccgtcgctcccttgcagtctcccctcatgtccctcatgtcggccttcaacacaacgatcctcggcgagacgctccgcctagtcacgggcaaccgcttccctcgtcaccctgatgagcgcgagctgccggccaagtacgccgaaggaagcgcgaaggccggttagctcagcgccagcagtccttgcgcagggcgtccaccgacactgagcaaacgcgtgtcggccagccgagccaacaggaagctggcgagaaggaggaaggagaggatcccatcatcgaaggagaggatcccaacattgtcggctggtacgggccagacgacccagagaaccctcggtgagtcctccagccgcctcgcggtgtcgttgcacctggacgagactgatagcctgctcgtttgctcgcacaggacctggtcgacggcgtacaagacttttgtcaccttctgcatctcgcttctcactttcagcgtctacatcggcagcagcatctactcttcgtacgtcggccccgagcacctgtttgttgctagagcacaggctgacttgtgccccgaccgtcgtttcgcagcggcaacaacggtccaaattcgatcatgtcagtctttggcgttacgcagacgtaggcgctcgtgggcctgaccgtcttcgtcctcggctacggcgtcggcctgctcctcttctcgctcagtccgaaatgccccagctcgggcgcaatcagctctatatcggcaccctcgacctctttgtcgccgtccagtttccgacgatctacgccagcaactttcacacggtcctcgcgatgtgctttctcgccagcttctttgggagcccagccctcgcgaccggcggggcgacgctcgccgacatgtttgcgccccagcacatttcgtacttactcggcatctggggttgcgccgccgtgctcgggccgaccctcggaccccttcttggaggcttcgccttccaagctaacggctggcagtggtgtgtgcattgtactgatgccttgccagatgatctctgactctccggcattgcgttgtacatctctctctctctctccttctgttgtcagccgatactgaagctgcactatccgccgcaccctcttcgcgcccgcccctttcgtgttcctcaagtacggcggtcgtatcagaaaggccagcaagcgtgccaagcaggacgaggagtgaggctgtcgctagcgcacgacatgaactccctctagcctagtcccaggccgcctccaaccccactttcccttcaccctttcaacccgcagctccaagcctttcgctcatcactgtagctgtagcgtaccgatggtatcttctgtaaaacgtgtctgctcgagttcattcgtgaaagcgggagcggtcatcgtcatctaggttgccctcctgagggtccctcacgcagacgctgagctgggagagaggcttccgagcgtgtgcaggaattcgcgagggctgaggatctcggtgctgccgtaggtgatgcgcttgccagcgccggcagcaacgccagccgccgcggccgctgctgcagtcgcgcgctcggcccactcggtcaagttggtgtactcgacgtagccgccgccgccgacgacaaagacgatggcctcggcgaagacgtgccgattcttgccggcgccaccgcggccgacgcctgctgacggccgggccgagcgcgggtcgaagagcaggtagtcatccgtgtcctggagcgcctgcgtcgaagccgtcgccggctccatcagcgcctcgacgaggcgtgtcaccgtgaggttcttctgcgccggcaggaagttcttgacgccggcaatgagcgactcgaagccgccggcgagcggcaggccattctccttcagccggtccgagatctggcaagagcaagtgttcggcgggtcagtctaaggccagacgggatgctgcgaggagcgaatgcgacgcactctgctaccgagaacgccgaagccacggaagagctcgccgccggcgcctccactcgtcaccggcgctgccggagcagttgccagcatcgtcatccgcgtgatctcgcgcaccctacgatgggcaattatccgaggtcagcgctcggcctggggatacttcgtctcaacgctcgagacaccaacttcttgacgtattcgagtgcgctcatgtcggcgccggtcgtcttgagcgcgagcacaatctcggcaaggtcctccttcgtgacggcgttgtcgggcatcgagaggaagtagataatgacgagccgaagcttgtcctcgtccgtgcacgacatttcgtcccgatcgcgaagaatgtcgaggatcgccgtcttggtctgctttgtgatggcctcctcggtctggaagagcgtgtcgagcccgcgcgacttgatcgcctggagcagggccgttgcaatgttcatgtgcgtgtcgagcgtatgcttgcgcgccgtcagctcgggcaggagcgtgatggccgtcttgagattgctcgcgttggacgagaagtcgctgcaagggcgcaaggaggcgcgtcagactccgagccgcgacatatcagtgccgatggcacgcacatctgattgatgtcgttgacgtcgctcatgccggtcgagcgcgtaatctcggccgcgtctgtcttgtaacggttgagctcggcatcgatgtcctcggctacctgtgggaacgggttcgcagcattctttgcccaaaagaagtccttcgagtcaaagtcgtagctcttcttctgcagcttgccgttctctggcgcctgtggtcgcgtagggaaggtcaggacgggccgagctctgtgactgcctgcagcgagactgacctcgacggtgacgcggttcagcttcatgtcgaggacgtcatggacgagcgcctggtacgtccacgagtggctgagcatagggacaaggtcgacgttgcggtcgaggatgacgagcactagacgagagcggaagcagcgaagagtcagcgtgcacgagcgggactcgccccaggcagcttgaacgaacagggtcgctgcagtccgccaaggtcaccaccgctgaagagcccgcccgcgggcccgcctgtcctcgccgatgtctggaggtggtctcgcagcaaactgtcgagcttgcgcccgaccatttcggccgcgttgcctcgcgggcagcggacgagcgggatctggcccgtcgtggcgagcacgctgaacaggccggcagcgatccggtcaacctcggacgagaggagctcctcagtcgtcgaggggtcgttgaggagtgcgtaggtcgggcgcaaaaggttagccgagggttcagtcggcggcgcagctgagcctgcggaggacgagctcgcagggagcggccgcgggaggagcgagaagagcgatggcgacgggacgatgaagtcgaggtactgatcccagacctgctcaacgagatcgccgctaccgctagccgcgagctggccggcgagatcctccatcagcggccgaggaagggccgacgtgaagttgagatggatggagtcgtacaggccctgctgggcgtcgagcgcgacccgccggacgttggccgccgtaggcgagatgaagtagatggccggcacgtccgggattggtggccggttcgagtgcagctgcctaccaacgcaaacgaggccggcacaggagcggtcagttgggacgagctcggcgagcaggcgacagcggttggctgccagcgcagccgggcggcgaccacgcgcctcgagacgggcacctgaaaggcaacgcacatgtgaagcgtcacgccctggtcgcggagatcctggacgcgcaggcttgtagcgagtacgtccttgctagcctcatcgagaatcaggaccttccagaccggggcgccgacaacaggcccggccggcccccggccgttcgcgagcgaggaagacgacgcggccgcgctcggcaggttgaggttgaggagcgagccgagggccgccgtctggtgcgtgagcagtgagggcgggtctgccgaatgtgctgatgccatttgccagagaagctgctagggaagacggaaggcgggtgtgaggattggcgaggcgaggtgatgggcatgggcaggcggagggagcgggcggagcgatggcgcgggacgaagcgcatgcgggcccagacaagtccccacttgttgaacagttcgccctcgtcactcgtctcggatcggcacgagacgagaaggcatgcccaagtgctgatgatagtctccacaacgggcgcgctttatggcagagaggatcgtgcagcgacggctcagatcgacgccagctcgcttcgcccaccccatccgactccctggtggccacctctctccgacctcgcgacagcagccaccacgaccctcgagcacaccggttccagtttaaacgggcatcggatcgtgaagaagggttgctttactcctcgtcgtcagcggcggcctcctcctcgacctcctcgtcctcctctgcaagagcggaaagagctgcgtcagcgggacggcgaacacacacgctagcagcctcagcagccgagcagtgacaatccgagacgcaccctcctcctcggactcctcctcctcagcggcagccgactgggcctcccagaccgaggtggcaatacggtcaaggtcccggacgccgtcctgggagatcttgcgaccgccgtcggggtggagctcaaggacgccaatcttctggagcgactggcagacgttgcgctggacggcgcccgaggcgtcgccgtggtgcgaggggcgcgagccacggcggttcttgccgccgtggagcttggcgagcgcgccgatgccgacgtgcttgcggaggtagatgtggcgcgcaagggcggctgagagcgagggaggacggcggatcgaagtgccaaggtcagcggcacgaccttcgaccgaaagaggcagcgggtcggcccaacgccttcggctgacgggcgagcgtcagaggagcgtcgcaggcacgcaacccttccacactcgcaccatccgcctcgacgtcctccgcaattcccaacccgacctgctgttcagacaaagaaatgagacgcaccggcacggacgtagtaccagtccgggtcgtaaggagcgagctccttgtaggcaccggtcttgacgatgtcgacccagttggggatctcgagcttacccgaccgcttaaggtgcgacgagtaggcggcaatgaagtcctccgcagctgcagacggcggtgagagcgagcggcggggtcagtccctgatccttgtggcccctaccctgctactgttgctgccccccgctccgcgtgcccttcggtctccatcggcgcgctgcgagcctccactcggtcgtgctcccctcaaacgtgctcccccgagaaagcgagcacggccggcggcggccagaggagctcgacggcggcgggcgcgcccgaaacagacgggccggaaggccgccggcggcgggagccagcagttgcagcagcagcagggtcgggaggtcgttcggtttgtgcgaggacacgcacagatgtcacgaacaccgggcattttgaaggatcaagaagtcgaacgaggtctggaacctggacgtttgactggtggctggtagaggacgaggggcagggtcagccgagctgctctggccgagcaaaacgcctggacccctccaaacgtgtgccgccccagctccgcgcctgccccagctcaagcgccgtgccgctcaggacgcgctcccggtgcacgccgctgagctccgctgctgctcctggccgcccgaacaacccttagcagagcagagctgagcgcctgggccgtgctgtggtgctgggaggaccgtcgtgcagctcgttaagctcgagccttgcctatcgagctcccgagcggcggagcccgccagaggcaaaacgacgctctaagcgaccgttcgatcccgttcgaacggcagggatccggactaggaggacacggcctaaccgagctgcaaggaggtagggtccgacaaaaggcaggggctcgagactgaccgatatgcttgacggaggctcgggtcgggcagcggcggcgcgactcgatcgacgcagcgggccggcgcgcggccgggactcgactcaacacccgatcatgggtttctcatcagcccaaatcggtttcatttccagcgagccgaccctagagcgacgactcgtgccactgaaggagactcgaaatctgatttatcagctcgctaggaggcgcaggacgaattctcggtctgatgctcatcattattgagagcttgcgacgtcgaagggtcaaaaggatggcccgtcgcacacgccttcatgcctcgcctgccttgccggcgacgacgacgaggttacgtgggctgacgtcgtaagcccatccaacgacgacatcagcctcgatgtcgtcgacctcgttgagcgcccagtaccggtcgagggcgatgatcctgcaggatggggagcacttggtcagacgcgggctgagcagagaggggagaccgtcgcactgacgactctacgacgccaccgcaggccttagcgagcgcctcaacaacccgacctctgccctcccaccgcaagttaccaaacgatgcctcgagatctcgcgccgccaccagagccgcctcgcggtcgatctggtcaagggcgccaatcttgcggagcgcgcgctcggcgtaggtcgcgaagtcgtccgcctgcgcgagagtgacggtaccgaggggcaggggctccggtgtcggaggcatgttagtcgtagccaggagagccgtcaacagtcgtctgtaatgcgttctggggcagaccggcgcaggcgtcagtttcgcagtcacatgtgcacgttacgaggcgagagaacttacttcttgcgcacgagcagacgccggccggccagggcggccgtgtcgcgcgcgccactcgcccaattggacgtgtcctggcaggcggccatcaagccggtggacgagagacggacgcctgtctgccggatgtgcttgctcaaagggaaggcaagcacttccgcactgtcagacgacaagcgcaagtggtggaagcagcctgatggaaggtgaggggggtcaggcccactcttgcgacccggtagccctctactagacgtacaggcggccacaacggcgcccttgatgcgcttcgtctggacaaacatgccaaggatgtcatctgtgaggcagccacagcagtgaaggccgatgacgagcgcgtcctcgtcgccgagccaactttcgatctcggctctggccgaggcagctgaccggataaaggccgggaggtaggtgatctgatgcgcaagctcgggcgagagacgctggcttccggccagttgtgcctcggagccgtcgatggcgagaaaggtgaaggttggatgcagcgtggcgagcgtgcgtgtcaaatactagtgcaaagggagtgggctgatggtcagatcggtcagatccaccaggagttcaaggcaaaggagggacgcacgccttgcccggcgccgatgtcctgttggtcgagtgcagagcgtcagcggccggtgaccaaggtcggtgcgtgcgcgagggagtacgcacgatgatacgacgtacgccgcgctcctcagcgatgcgactgacgagattgatgaatcgcccgacttcgtgcgcctttttgacgctcatgccaagcctgacatccacgtctgacgattctgaccgagcgacgagtcgaggcaatggcagcgcacgagccgcttcaagaaacgcggtcaaggtggcgggtcggccaggaactgatgagaccagctagtccaagtgtcagcgccgactcttctcgtgactcgaggtgacgagtgtctggtctgaccgagtacgcacgatcgaggccgaggcggatatcgtccagcttggcctgcaggtcgtcggcaaggtcacccgagtcgaaccacgcctgccagtcggcaggcagcctggaccagtcgcctgggtcattgccaggcccgcgcctgtctggcctcggtaggacgtccaggtgatggatctgggcctagcggattggcagacagaggggagttcagccggaggcgcagcaccgaagcgacgggcatggcagaacgtaccgtcagaagcgtgacgagttcggacgtcaagaaggcgctcagggccgtcgtatacgcctcgaccgagtcgtaggcctttggcagctgcatcgtgtcagctctcaggagggaggccgtgcgagtcgggcgagaagaaagggtcgccgttgaagttgctcgaccggagccgtcgccgctccctagctgccgtcgtccatctcgacttcagccctgcccacccacgcagccttcttccccgactcgccatcttgctacgacttaccggcgacacctagcatcgaggtcacggcatgtcgagctttccgaacctgcgaggtgcgcaactcccgtgctaatgccggccagcgtgggacctgcagcagctgaccgaccttcctgctcaccctctcgcccaccggcagccatctttgctagctcgcgctcgtccgaggatgagcggcggctgtccaagtcgacatttttgaagttgtgcgtcgcactgtagcgcctcggcatgatcagctgacggagctgacggtcgacccgagattctagcatcggcttcggcgtctcgtgcgccgtcatcagcatcatcgcccactcgcgggcgactcgcagcctcgcctgatttcagctggcgtctgccagcctttccttcccaccaccacggcgttccgacgtgggcgaccttctttagctctcgccgacgacaatcgagctcggctgacgacggccgaggactctggctgcaccactcgcgcgaacaaaacccggcccaacctccgacaagatgcgcggccgccagcatgtagacaacacggaagtgtgcgttccactctggctgcgctgcccgtcgacaggcaatgcggaccggtcgcaagtcggagcacgggttcgtctaactcatgcgcagcaagccagcgcgacccgaccgcctgccagacgcgacgactgcacgaactctctgtcgttgagatgccctcatgactccagaacgagctcgttggtggtccgcggtcaaacttaggatgtcaagtgttgcgcgccgtccccttcgcccgatccgccaaccaggcgtttcgcctagcagatgagcagtgatcatggttctgcccccgggcgcacggcctgcgtcggcgtgtgagcgccaagagcgctaccctcgagctggtcaacctcgactttccagcggcgcacttcgtccagcgtcaccttcggccctagtagcgcgtcgaccaggttgcgcacttgccgccggttgggctgcggcattgattctggctcggccagcgcctgcagccgatctgcgaccgttattgacagcgagggacaggaggcggcgtgagatgcgacgacgtcgagcggccgggtcgctgtaaaggtccagaggccgactcgacgagagcagagcgcgcacgtcacgaccgtctgcggagcgggagaggcgtgatcgctgaccgatcccgaggcggtggtcgtcggcggtcgtacgctgagggttggagagggcagcagctgccagttgaagacggcgaggatgtctgctgctagaggcaacgcagtggacggggcgtagggagcggctgggctgcgcggcgtcgcccgctgtcgaggccgaagcgacctcgtcatggtcgccaagtctgcctcggtctgcagagacgttcgcaaaggaagatgtagcacgtcagagagtggcgcacgtacgacgagccgcactggcagcagaactgacgaaggggtgtgcgagctgcaagcctgagggcaggtggggccgaatctcgtcggcctttcgattgatctcggctggacggagcggcttgacctcgacggccggagcaggacctgttttggcgaggagctcgataccgatccgccatgggcagctcggacgatggctctccttgagaagcatccgcatccgggtcgcgagcttctcgcgcgcagggcccttgaggccggtgaagtcgctcaccttccaagccgcctcgcagcagccgcactttagccaatcgcgcccgcccgacgaccagccagcccgggctgcctctgatgaagggaaagccgaggccgagaagttaaggaggttgaacgagccgagccgatcgaggaagtcggccgtcgagaagggagcgaagatggccgacggcgcaaagcgagccttctttgccggaggagcagtcggcagcgccgccatcgcctgggcgagcgtccgcttcgacaaactggtctgtgagcgcaagagcgggatcgagaggtcggaccgtccctcgccgaatgaggaggtgagatgctgctgctgcggcgcctgctggtcgagctcgtccgccgagccttcgtcgctgtcgtcgtcacgccaggagccaaagacgtcctggatgtcgccgaggatctggagctcgagcgcctcgtcgacgtccgtaggcgacatggtcctgcaaaggctgagggtaatcaggaggttgggcagggtgggtgagagcaggcaggagatcgagccagcaacgacgcgcgctgtcggcggccctagcgcttccagatgcgtacgaggcggtcaaagggtccacatgcagcatcaatcgtcttcgtcacgcgtcgagcgacagccgagtcgcacgcgcagccacgagctcgtctccatgcagccggtagagctgacgctcgtaggcgacccgaccaccggcaccgcccgtccactttgccagcgcagccatgcccgcctgggcactcgcccgcatcactcggccctgcttgcctcggccgaggcccagggcggcctgagccttgtcctcggcctcgaggacgtcgtcgatctggaccatcgcctggatgatgggcacgtaatcaaggatgagggctggcgagggcaggagtggcgctggcgcctcgatcaagggctcaagcatgtcgagcagcttggcgaggtggactcggctgtcgcgagggatgtgggagcgtaggtcaggaacagaatcaaagtgatagtcgcgtgagagcgacgcaccggcgggggatccattcgagcaggtcggaagacggcgtcggctgagggatcccgagtagatccgccgctcggtcgaacctagagcggctgagcgcaagattggcgctggcgatgagccggctgagtccatgctcgggtaggtcgacgtcgagcggatctggcaacggtttgagcagatggtcgtagtcgaccgggtcgttttcggacgtcgcgaaccggtccgggtcaaagatctcggataagtcggccgcgcgccagtcgatgtgcgcatcggcaaaggagacgctgtcgagatgcaaggcgatggcggcgagctgctgcatctcgtctctgtggttgacgggccgatcggctgggggttgcaccgagggagtggcccaatcggcgaggcgggcttcccagccgtcccaccgcgtctcgctcgagttgtcctctacgggcggcagaatcaaggcctcgtccggcgccgtgcctcgcagagtctgaagattgttgatagtccggcgcaggtcggtcgaatcgggcggctgagacggagccgggtgaccagtcaggtgcgggacgccggccgtgaaagcgtggtgcctctgatcccggtgaaaggcagtaattgtgtcggcagcgagatcaagccctccggcgtgcgccaggcgctggaggtagggcgtcgcaacctcagccggtggcgggaggaagatgagcgttgcctgaagcgggaggtcgtcgagcggaacagcgctgatgtctgcaaagaggaagcgcaatccggtcagacacggcagccaagagagacgagaagagttcggcggactgaccgttgcaagtcatgatgactggccgacgagattccgagatgagcgagacgacggccggccagaagcccttgtcctcctggaaaaggatgtcgacctcctcgagcaggatgcacgactgtcgaatctgctggccgttcacaggagccgctccgaaagggctcgaggtcgccgtccgcggatcacgctcttttggcaagccaaagccgtcgtcccttggcgcctttttcagcaggctcgtgagcgcgttggtcgaggtcgacttgccggccgaggcaggagctgcggccgcagagccgccaccggtgccgcctcggccgacaaggtggttcttaccgacttcgccgaccatctcgccgagagcgacgcccgagcggcggacgcccggatagacctcgaagacgtcccagccgagctcgtgcgcgcaggcgtagacagcggccgttttgcccgcgcccgacgggccgacgaggaggatcgagttggagagagaggaaatggcgagcggagggtaggccgccgtcttggagccttcggcggcagtcgacagctgaggtcgagtctgggacgtatagtgctgggtgagcttgctcggcgacagcagcaaggccgtaacggggacaggcgcttgcttgaggttctcgagcgtgtcctcatccgacgacctgccgtcgtccgactcgaccgggtcgccgaagtactcgagctcgtcgtcgacgacgatccagtcgtcctcggtcgccttcttgcgccgcttgcgggcgcttttgtcgaccttgcgtaggacctgccgtttggccgccgacttggcgcccttgccgtcgagcttggcgaccttgacctggagcgctacaagccagtcgcgcaggtagacggcctcatcctcgttgccgaggacctcggccgcggcgagagggcggaagcggtcggcccagagatcgggcgtgtgcgtcgaagccaaggcagcaagtcgcgcgaatgctgggtgctcggccagatgaccgggcaaggcaaccgcgggagggggacggcctgcaacacgtccggtcgtcgatgccgccgaggcgctctctctgggcatcaggtctgcccagaatgccgaagcgccgaccgatgcatcctccctcagcttcgagcgccgaacgtcagagagactcgcgatccggcgcaggtcggacgatgcgtcagagtagaggccgacgagggtctcctcgcgcgtcggccaccgtggcaggagcgccgccaccggtttcagcttcgtcggcttggagccgagccgggaggagaagaaggacggcatcgcccgcgtaggcggcggtggaggcgggtcgggggccgcctcgacgtcgatggcgaattcagcagacgaaccaccgatgctacggctgagtttcggccgctcggccagaggagctgcgcccttggcgccaaagaacggatgcagcgccttggccgccttgacgggaccggcagacgcgataggggaccggatccgacccgaggtgtcggacgcagcctcgacctcgtcctcggtgatgatgatgctggccgcagtcgacgggccggcggtccgactccgagtgctgccgccggtctcggtctcagatcccgaagagaggacggtgacgctcttgcgtttcggccgagctgccgctttgcccttcggcggaggcttcgtcgacgtcagcgctcgaacagctgcatttaggtcgttcttcttgagcggcttaggcctggaagggcctgcgaccggctcgaggacaatcgggtcggacgaaagtgcgccagcggctgtcgctgcggtcggttcggccgcgagatgcgagactcgtcagctggtcgtttcgttgcggcgcaatgcagtgtagcaagcgcactggttctcgatccgctaggccctgcagcgtcctcaaagaagacgacgtcgctggacgggtctgcagtgagcggtgagagaagggttggaaatgtcaggccacggcatcggaccatctcgtcagaggagctgagaggacgtacgctctccttccggctcggagtcttgagcgcccttgctcacgttcgacgccgtcccacgctttttgggggctgccttgaccagaggcttgaccttcgactgcatgccctgcatctcggccgcctccgggtccgtacccgcggccttgcccttgcgcgcgcccttgaccggcggcctcggctttgtcgcagcgccagcagagcttgaggcagccttgcctttacctttgcccttgacaggcgctttcttggccgccgctgccggaccactgctgccgtcatcgagcgccggcccttggtctgagctcggcggcggcgcgtcgaccccggccggtggctctggcgccttctcgatcttccagccctcgccaggcttaccaaaggccagacgtccctggtctgaagagacctttatgccagctctcgtcttgcgttttggcccggccgggacggctgacgtggaagctagaggagcgggcgttgcgtcggccgtcgaaggggtcggtgcagcccgggtcgagctcgatcgaccggcgctggcgagctgggccgcctcgaccggcgcgatggagttaactgccggctcggaggccgtttgaccttccacctgatcgtcgtccgccatgtccgaggtgtcgaggcgaggcgacgaggaaggcgagatgagcgtgagggcgagtgaaggtcgaggtcgagggcgacgacgcgacgcgacgcggcgaccgggatgaggcgaggtgcgagtcactgccgtctcccccttgcaccctccaacgttgctcttttgatcgtcgacaggcagctagtcgcatcgtccatcagtcctgctgatagcttgctcgagaccgaggaggttgaagcatgtgcccaccttctccagccgatccggtcggagcttcgacccgcagcgcgagaggcgcagtcgtcggtcgcagccctgcctcagcccgtcgtagctcggcactcaagctgctccacctctcatctaccgagacagtgggaagtgctctttcttcctgcccgaatgccttcgtacagcctgtctgacatcacccgtctctgactctgcagagcccacctcgtcatcggccactctcccggatcgagctattccgcgcgcgctcaacaggatttctcgactgcgaacgtcgacggccctcgacgtcgatgcctctccgacccgtctggcgcctccttgtccgtctcgtaaccccgtcgcagcgcgccagaaccatgacgaccaggctcctgcggacaaatccgtcggctgtctcgttcgccgccggtggtgggctcgaggcgccgccggtcgtggcggacccgacgaccgacactgcgctcgacgaagccgcgggtcttctgcgcgccggcgaggtcgttgccttcccgaccgaaactgtctatgggctcgcggccgacgctctgaatggcgaggccgtgctgaagatctttgcggcaaagggtgcggttcctcagcagctcgcagacacctcggctgaagggctgaccgacgcctactattccccgctcgaccttgccaggccgaccgtcggacaaccccttgatcgtccacgtctcctcgccagcccagctgccgctgctcctgccggacgactacacgccgtcacctctctaccagcacctgatacggacgctctggcccggccctttgacgctgctgttcccgtcgtcgtcagccgtgcctgcgcagacgacggccagtctgtcgaccgtcggcgtccgcatgccgtctcacccgctcgctcgcgcactcatccatcgcgccggcacgcccctcgccgcgccgagcgccaacgctagcggccggccgagcccgacccgggcgggccacgtcctgcacgacctcgcaggccgcataccggccgtcctggatggcggcgagtgcttggtcgggcttgagagcacggtcctcgacgggcttaacaacgacggccacttgcgcatcctccgaccgggcggcgtcacgcgcgagcaactcgagcaggccgtcgccgactttgagggagcagggtccggccgacgcgtcatcagcggcgaggagggcttgcggaaaggcgagcgcgagaagccaaggacgccaggaatgaagtacaagcactacacaccgacgatcccggtccatctattctgccctcggacagatggaggcgagctcgctaccgaggcgctctcccggctcgtcgaccggcattcaccttcgagttcgctcaaggtcggccttatggcgtacacgccgtcgaagctctctctgcccgactcgagcgtggtcgattttatccgccgcccgctcggcgctcgctccaaccccgaagacgccgctcgccgactattcgacggcttcctctcgctcgaggccgagggctgcgccttcatcatcatagaggagggcgccgagctcgacggtgtgggcgtcgccgttgctgagcgcgtcaagaaggccgtcggcaaggatggcagtgtgctcatcaggatctagacactgacgaccaaccggcaacgtagccttcacgaccgaactgctcggcagtcacctctaggtgcgtcctctcgcatccgacttttgcgcgccgtcacgcactgacttgtgtgatcattgcagacgcaagctgcgtcgtgctccagctcattagagcagggcgctgcgcgcaggaccgactccatgccgtcgtgcccggcaggccgaggtcgacgctgggtcgtgtgccgaggcacaagccagccgctcgactgccgagtcgcctcgacgagctttggctttccgccaccgttcacgcgtcggcccgcagcgctcacacgcacaacctcgttcagcagacgagtacgagacttatcgcagccgagcacgccacagagagacgctctgctccggtctcctcgtcgatcagacgacatcgatgctctttctcttgcgccgcaatccttttcagaccggctcacctcgggaaagctctcgccggctcgggttctcgcacgaccatgcggccatgtgaaggcgcgctatctttcggccactctttagaccagttcgagcgcgagggacgaatgcactgcgcacatgagctctcgcactcgccgcggtgggcaacaagggctcggccgatgcgcccgctcgcacgacctgttgctggcggtgctgacgggaccaaggccgggcgatatagaggccgctcttcagcatgtcggtttagtaggctacttttgcgccgcagacccgcatggggcgcgatgcggccctgatttcgcgcagcacgtccaagagctgtcgacgacgcgcctcccttcccttcatgccctaaaggcatcgagggcgggtcctcgggtcccttctttcctcccaacagctcctctttcctcctctcccggtccgacatcgacttctcttgggcaacctgcccctcccgacactccctttagctcacagcctctacggcacgctcgtccgctagctcgtcctccacctcgctctctctctctctgtctctcgcctgttccgtcctcgtcgaacgcggcccgccatgctgttcgcacctctcgccgctctcgcggcaaccatcttgtcggctgccggagccgaggcggccgactggaaggccgacaaggccgcatcctcggtgagtttgctggcggctcccggctcggcctcgatgcttgctcgtgcccgtgtcgatctctcagcgctgaccgccatttgcttgaccttcctcgccgccttcccttcgatcgtgcagccgctcattgtcaagggcaagtatatcgtcgagtatgcgtcggatgcctcccgcaagcgcggcgtcgtgcgttgctccctcgtcggctgcgcatcttctgagctcgttgagctgacaggcctcgctcacttgcatttcatcgctctccaggacgtccacacccactttgactcgcacatgcggcgggctgacgttccctacgaggtcaagtcgaccttcgacgctgctggcctctttgtcggcgcctccatcgcgtacgtcgccgaccggtcgaaacgtcaaccggagagagtctgctcctgacggtcgcctgccttcctccttctcagcctcgccgacggcgacgtcgaggccgtccgccacatgccctcggtgcaggccgtctacccagtcaaggtcgtcccccgtccgaggccatacaacgacgtcgtcaacgtcgtcgccggcccgtccagcaacccgaccgacacgtacgccccgcaccgccagaccggcgtcgacaagctccacaacatgggcatctacgggaagggcgtctttatcggcgtcatcgattcgggactcgagtgcgtcaacgccaactcgctcggcccaagcgcagctttcccttaagcaggcgggacgctcgctcacctgatcttccctcctcgactgccctgccacgcagctacacacacccggcgctcggcaacggctgcttcggccggcccgagtgcaaggtcaccaagggccacgactttgtgggcgacgactacaccggcaccaacgacccgtttgtcctcccttcaattcgccctttggcagcgcgacgtagaagcccactgactcttggcatctccaaacttcagggcgcccgatgacgacccaatggactgcggtggtcacggcacgcacgttgccggcatcattggcgccgaccagaacgggctcaacttcaccggcgttgcgccgcaggcctcgcttggctcctaccgcgtctttggatgcactggatcgtcgcagaacgacatcattatggaggccatgatccgggcctacgaggacggcgccgacatcatctcaatgtcgctgggcggcgcctcgggctggacgcaggaccccgagtctatcctcgccagccgcctagtcgacatgggcgtcgtcatgtcccttgccaacggcaacgacggctccgagggtctctgtacgtcgcgcttctggctgtcgcgtctgacctcttcatcacaccactgatcagcttagttccaacgctttgccagtctacagcgcggctcccgcgactgcaatcaactcgctcgccgtcgcctcggtcgagagcctcatcatcccggccatgcctgtcgttatcggcggcaagccctacctctacacgtccgaggccttatcggctgagaagacggccttcccgatttacgtctcttcgaccaccctctccaacccttcgaaccttggctgcgagccctacggccccgaggtcgacctccagggcaaggtcaccatcgtcgtccgcggcagttgctcgttcgcgaccaaggctcagaatgtcgtcgacgctggcggtgacatcttgctcggtgcgtctcgtcttgaagctcgcatcaaccgtggctcaagtctgacagcgtgacgcccctccccgccagtcctcaacaacgctcccgggacgctctctgcctcgttcggcgacgtcgacatcttggccgccaccctccttcaggctgatggcccggcaatctttgcctcgatccaggccgaccccaaagtgaccgcgtccttcccaggcggctatgtcaactttgagaacaaggagacaggcggccttgtctccgacttctcgacctttggtctgacgaacgacgtctaccttaagccctcggtcggtgctccgggcggcaacatcctctcgacctaccccattgccaagggttcgtacgccgtcctctcgggcacgtcgatggcaacgcccttcctctcgggtgtcgctgccctcttcatccagcagcacggcaaggttgaccctaacctgatcaagaaggtctttgagacgacgaccacgccaattttcaccgagatgggtggctcgcagctccagacgatcgctcagcagggcggcggcctcatcaacgcctacgacgccgtcctcctcaagaccgtcgtctccccctccgagttcaacttgaacgacaccaagcacgccgtcacgtctggccagatcacgctcgacaacatgggcgccgcggccgtttcgtaccggctctcgcatgtcgctgcccctgctgctcttacctttggccaggttcgtctgccgacctgcccttgcctcgcgctctcccagctgacgttgctctccttccctcgacagaacaatgcccagcccaaccccggaccggccgtgcttgttgacggcgctgccaccgttaactttgactcaactttcatcaccgtcgccgccggtggaagggccactgtcggcgtcacctttgccgccccgaccggcctcgagccgtcgaccgttcccatctactcgggccacctccacatcgaatcgtctgacggcgctcagcagttcaacatcccatacgccggcgtcgcggcctcaatgaaggacgactatccgatgctcgacacgtgcgtctcatcctcgctggtatttcgccctcgtcgagcgaggctgactgactcgtctttcctcagctcccctgagcactttgagaagttttactcgacctcggtcgagctacccgtcctcatgtactctgacggcagcttgattcaggccgaggccaactttaccggcgtcaacggcgacgctccggagatcttttaccgacttctcggcggcacgcctaacctctttgtcgacctcgtcgaggctgccacgacctttgcgccgtccatcgcccgccgttcgcttctcaaccggcgcatgcacaagatcaagcgtgcggtcccgacgacgccgtccatcgtcggcaacctattctcggttgactacaactcgcgcaacgtcatctcgtcaaacaccaacggcaagggctactacaactatccgatcagcgcgagcgagactggcttctccttcgcaaacggctcgcaggtccccgacggctcgtacaaggtcctcgttcgagcgctcaagatctttggcgacgagaacgacgcagccgactacgagtcgtggctctcacccgtcatcaacatcaacgccctccttcctccttccggcaacacgactctgcccgagccgcagcccgaaattaacgctactctgccgatcatctcgctcccctcgaacgagacaacttccttccttccctccaatgtgacggcgccggcgccggtcagcgacaactcgacctcgacgacccttccttaaagccccttctctcatctcacctgctgtgcttgcactctcgcatctctggattcgcactctgcccccttgtagccttcaccgtttggcatccacatctcctctctttctactcatcccgggcatccttcactgtctttcgccacgcagtcctgtttcgtcttgccctccttcttgcacctgcatgcgtatcgtttgcccttgcatgcggccctccttcacgacaccggaagccatcactgagctttgacgcttgctctgaccgaggagtcgttgatctgaatgagatccagtcaagtggttgactaacgtgggtcgacgcacgcccatagccggcgcgtcgtccgtcctggcgaggcgcaaaacgcacatgccttgaagtgtggcccggagcctaaggagagtgcacgaggcctggtaggagctcccgctcgagcgggttgacgtcgaaagggcacagtgagcgacactgaaaggggaagagtgggctgcagccccgcggtccgtatccgcaagacatctcaaggcgtcaagccttcggcaccgagatccaggtcagcaatgagacgatgccgtcgatcggcctgagtgtgatcgcggacgcacgattgtacactgcgaggccgaagccttcccgccgcaagaggatgacgcgccacggctctgcgcggacctgcaggaaggccgacctcaaacaaaggcgacgcggcgcttcttctcagccggcgcagcctccttgctctcagcagccggagccttcttcttcctctgccggagcttctccttctctttcagcatcttcttggtcgcacgctaacgagacggcggtcgaaagagagggagacgggtcagatttgcgcagcaggggtcggcgagctcgtccttgacccgaaggacgtacgagcggcgcggtccggtcaagcttgcgctgcgtcttctgcttttgagcatctgcgtcgacctcggcgactttggcctgtatgggtagcaaggtcaggaattgagggtagctcagagtgagccagaggggagcacatggccggcgacgcacaaacttctggagcttctcggctcgctcgtcgtccttcttgccggcgacctgctcgatcaggtccaagagcgagctctgcaaatggcaacaacgagcataggtcagccaggctcagcagacgatctggcgagagacaagctcttggccggccgcactttctcctcgatgaacttcttgcctttcttgccggacggcttgcgcactttcggcgtcgccttgcggctcgcgtggtacgctggccggctcggcccagccttggatgcggcaggtgcaggcgccgagggctcgggcgaggacgagcgtgatgcgtcggcttcggaggacatcttggcgttagggtaagggaaggttggtcgacgttgggggtttgaggcaaagaacgacagcggccacgatgtctacgccctggcgttaatgaacgagactgccgtccaagcttatatatcattactccgacttgagagtaagcagtcgctcgctgctcactgatagcctgtcagagatctcgatgccagcctcagaggtcctgttcgagccatgatgctagctgtcgctgctcagcacctcgcgcgcagcacctcctgccctcgatctggacggtcggaagatcaggacgcctttccgaccgtccagtgcatcctgcgctgacctgcgatgatgcacatgtatcgacgcatctatgctcgtgacagcgatgcgcagtcaatgaccggaagggccgaagaggcgaagagttacgctgctgaaggccggtcgggcaaaaggcctccggcgtgccaaatgttggacggttgaccgctgatgcgaggacgacgtccgctacgaggggaccgccgccagatgccactaggggtcaaaccgatgggtcaggaggcgagctagttcgccgaacgtgcggctagcgctgaccggctggcgtcccgagagcggtcacttccagactctgccgtcggctagaggtaatcttgctggccggatacgacggacctagatcgagacgcccttgatggtgaccttcttccccgcctcgaggacctcgattacctggtcgagctcgcagaaccagcctgtcttcttgcccggccggccaccggagcggcgcgtgcgccgaaactcgaccctgctcatcgccgacgcgtgaggcagctcgaacgcgtgcagatggaggtgcgggaccgaggtgaagggcgggatatggaagccgaacttgaagcggtcgacgtcggcactcttggcggggcacgctgtcgagtactgctctagcgctgcccggccggcggcgcgcatccgaagcactgcgtcgagtgtgagagatcgcgtcagctatgatgacttccagcgcggattttggcagcctgacgcacaaagtgggacgtcgagtgcggtcaggttcttgaccgactcggctgagaggtaagaggtcgcagggtcagcaagagcgcgagaggacgagcgccctcgagcgcagtcctccggtggaaagctcgaggtcagcgactgaccgacgtggcctcgcgggataacgagtaggtgctgcctcgcgccttgactgcgatctgacattcatgaaggccacgagacgatcagcgccatcctcgaaagagagagaaggaggctgacggacggccgcaccggtgaagacgacgagcgcgtcgtcagcgaagcgcacccgatcagatccagcaatgccgttcacatcgagcgcgcaaaagacgcagcgttcggcctggacgtcggccgtcgggtcgagagcgacgggtttgtcggacgctgacggggccaggagcggctgcgagcgcggtcgctgctgctgcgggtgccgtgataaagggaagcacgacaggacgagggccggaagcgagggcatgtcggcggcggtgccggcggcactggcaacgctcgaggatgggcgacgccttgctggcagacagacgtgacctgaagctcgagtcgtcttgaaggcgggcgggcctgagcagggtgaagagggtcgttgtcgctcgtgaacagtcggcaacaggtcgacctccatcgtcgcctccgcgcgcagcgtgcccatcctcctccgccgcttcgcctgcgatcgagagcctccctcgactctggcaagatgccctagtatcggaaagcgcattaatcggtgagagaagtacgagcttaagctaggcgaggagaaagatcgcaacacgaaggggcgaaggatacagtgggccgggcgcggcagaacgggcttgctggagcgacagacagacagacaggatcactttgaaggcggagtggcttgaagaacctagggtttactgcttgtcggtgtggtactcgaccgcggacggcgaggggagcggaggcgcctcacccgaggctgggagagagaaagaagagacggagcgggggcatagggtgtgagaaagggacgacgttaaggcgaaaccaggcgccgagaaggggggcagagagacgccctcgaaactcgagacggcgctgtcgccctgatgaaggacgaccgtgtcgaacaaggagacaaagagcgtccggtcgctgccacccggcgcagtgcgcggtagcagaaaagctgctacttactaaggccaagtccttccgtgaagcgcgacatgtagctcttctggctcgtcacgtcgtcccggttggcgtcggtgcgcggggccgaggggacctcgtccttgttgtcactggatgacttgaccgaggcagccttcgggttggcgtcggccgagacagagtgcgagccggcctcggggccgagctcgacgttctgaggctgcgagtcgtgccggtcgttgccgctctgaggctgcgacgacgaggacgggccggtcttcttgtcgatctgcagagaggcgagaggtaaatgtcagtacggtatcatttgcaggggcaagcgcctgatcggtggacgcacagggtagccgttggcgcccatctccagcgggggctggacagcagccgagctagcggcagcctgctcgtgctcgtacgagtgctcgccggcctggtcggcccggggctgctcgtggaggtggacgctgccggcctgctgcgactgctggtgcgaggcacgctcctcggcgtactcctcctcctcctcctcgtcatcctcctcgaccgacgagccgccctcgtccgactcctcctcctcggaccggtagccgaccgagcggacggcggcggcgacgggtcccgagcgctccatctgctccgaggcgacgaggtagcgggcgacgagcatccggaggtcgttccaccactccatcatctcgtcgtgcgaccggcagcggaacgtgtaggccgtctcgttctggccggggattttgaagggcatgtggccgccggcagagttggcgggggcagccgagcgcttgccctcgatgtggaacttgtgcgagtgcgaggtcgtcgaggtcgagggcgggccgagcgtgcaggccggcaggaaaagcgagaagatcgggtgttgctgcgagtaggggtcggacgaggcgtactcgtgcaggtagccggccggggtgagcacgtagtaggcctccttgtacgtcttggtgaagcgtttcttgcgctcgagcaggccgacgtggacgggggcgaccgaggggtcgtccttgcccgggtagtcgatgtgatccgggttgcggagcggcgtctcggggtcgagcaggtggtcggaccgggcggcaaacgcgatccactcgcggtcgggctccatctgggccatggcgacgccaaggtgcttccatgtctcctggacggcggccgacatgcggccctgccactcgtcaaaggtcgaccaggtcgactggatcgagcggacaatgccctcctcaaagtgggccgagttctgctgcatgatgatgatcgacttctggagggcgttctcctcgttgacctgccgctggagctgcttgaggacgatcgtgttctgcgcgtagggatcgtccttggggacgacctgcatcggcgtgttcttgagcatcgtgatggccttggcgaggtccgagatgttcttggtcgacatctcgcgctccttggcgacagtcgccgcgagccggccagtgtcgttctggacgttcttgatgtgggccttgatctcggcccggagcttctgaaggtgctggacgatcgagccctcgaccgtctttgcgagcgaggcgtgcgagtcggcaatgacgcgcgtcttatcgcggatgttgtagaagacgtcctgcagggggcggcgcaaagtcagcaaaggcccatcgcatgcacgagcaaaggcgcagggcgacgcacctggaggccgtcctcgccgaggaactggttgccggcctggaacgggacctgaatgaccgagccgagtttgacgagctccttggccgtgttgttctcaatgtcggctgagggcagcatacggttatcagcgagggcgccaagagccaggagggcaaaaagacggaccaatgccctcgaagtacgagatgagcatcttggtgatgcgcttccaggcggtgaagcgctcgatcaggaggtcgctcggccggaagtccgagaccgacgtgttcttcttgatctgcggggaggcaaagaaacgcggggaggaggacggaggggttgcgtcagcgctcgagtttcccgaagaagagatggcgagccttccatccgctcgcgcaagcacgaaagacgacggccagaggaccggagcccggcaggcaggcaggcgtcggttgccagggcggcaggctttcgacgcttgcctccgctgcccggtcgacagccccctcggccggcggaggtcccgggtcgacgcagaaggggagagggagcgagcgagagagaagggacaaacgagcgactgagtgcgcgacatggtgctgccggccttgtggctccggctgaccgaagtcaccgtgtggttgtccgagtcgtgctggtggtgattgtggtgctgcattatatggaagacgagatgggtgttggtggccagccgacgttgcggccggcgtctggccgttttggctgggcctgcgggccgaaagcggcctcgcctcgcctggctccacccgctctgaaactcgccctgcgtcatccgcctccgtagccaaactgcagctgcgagtcgccaaagacgccggccgccgacaagcattcatgtcggtcgttcgacatgcgacagacgcaactgtccttattcaacggacgagaagcagacgggagctcggtcatcatgtcgtcaagggtcctgtgcatctcgaaagagccggccaaatgctctcagcgagaagtgcacgtgagtccgggtgggcgacagaaaaggcatacaggcaagtgccgtcgttgctagaagtcggcgagggagacactgtcaggctgggactcgataagagcgacgagagcaggcgacgtacctctcgatccacgctcctgcaatggcggactcgtagccgccgccgcacgcgccgtacgcgccgtatgccgctcccgccgtctcacagctcgacaatctcgagcaggtcgtcgtcctcgaggtctgactcgccgaccgtcagctccctcgcgagctcctcgccatcccattcggcccggagccgagtcgcctgagccggcgacaaggcgagcttcttcgcatagtggacgagcatctggccgatcgtctgcgaaggcttgacgagcagcttgacctcggtcccgcccttgccgcgcatcgtcaccttgagcgcggccgaggcggccgtcgtcgagggcccgccgccgtccgagtcgccatcgtcgtcagagcgcgcagccgtcgggagggatgcgccggatcccgcagcagcgcctcccgccgccaccgccaggccctgatacccgacctcggcgccgccgagacgcggaagagccgacgtcgacgcgactggcgaagacgatgtgcggccagcgattgctgcagcggcggtcgtcgctgcctgcgcgtcgaggaaggtctgctgctgacgctcggcctcctgccgccgcttgtgcgtctcgtacacgtcacgctggtagccgactgcgagagggtagccaaacgagtttgtcagcgacgctcgaagaggtcgcaggagtctaagctgacgacgactcacccaggtcgcccgagctatagaagccgagcgtctccggattggttgacgcatagacgcgggcgtcgtccttggtgacgacgagcgagccagcctcgtacccctttgctttctcggcctcctggatgagcgttttgatcggctcccactgcaggctcgcaagcggtggtcagcgtcaaacgtggagtgacatcctgcagaacgaggacgcacgcgattgaccttgaagaccattggccgctcgaggtagtcaatcgccgacttcttcgccttggccgggtcgaggtgcgagcgaacgacaagcgagatgcgaacctcatccggcgcgccgtacatcagcggattccgatgcgtcttgctcggcccggccgtcgccgagggcgaacgcgtgtgcgaagctgtcgcccgagacgacgcgcgagacgggccagtcgcgccagtcggcgctgcgggtccgctgacgaacgtcgcctgtatctcgtcgtcgtcgtccgagtcgccgagctcgatcgggccagcacttgctgccgaaactggctgaggcctgcgatgaacgggtgatggcggcgtagggacccttcgaggggccgccgagccaaagtagtcgataccgtcgtcatcgtccgacgctgctttccggtccgcccctcgaaggagcggattccgaatctctgcgtccatcgcgccgctaaaggtcaaacgcagttagggtcggttgaggtgctcgcccgacgagcggataagatgcgacgtactggacccgattctccgcatgctggaggatcgcctcagccacgggcggcggcggcgtgagcgagttgcgctggcgggctggcttcttgccattgctgccgggtttgggccgcttcttccgtggcgtgcgatcagaatcggaagagctgtattgaaagcgtcagacaagggtcagcgacgtggcaacagcgagagaagcttctcaggcgcgggcgacggaccttgagctgccgccgtcgaggagcgcagcagaggccgctgccgtctgctccatccatcggtgcttgccctggttcttgcgcttgaagcgccgcatattgcgggccgagaactcgccctcgtcctccttgtggccggtcgccgaacctgtgtcggtgctgttgtcgtcgaagtcgggctcgccgtcggccagcactgggctgctctcgcgcgggctcagcgctgtagcgaagaccagtcagcgatggcaccagctccggtcagacgacggtagattaggcaagcagtagacgcacccttgcccttgcccttggcacttgagctggcggccggtacctgtcggatggtccgccgggcttgcgccatccactcctcctcctcggcgagccgctcgcgctcttcctcctcctccttgcgccgccgtcgctcgtccagcgtcgccatattcccgtcctcgtcgagctcgatcggtccgccgttcaagctgcgctggcgctgccgagcctgagccgaggtctctacaatctcgacgtcgtcgtcgagctggtgagagccgacgacccagctcggcgcgtcgtcgtcggcgctcccgccgccgccattggccatccgacccttctttggcgtcgcataggatgatcgagagcgtgcagggactggcgaggacgacgtcaggtcgacggttgagccctgctggctcgggccgagcgtcgaagggacgctcgtcgcgctcggggcggcgatgcccgtcttgagccgcggcttgggcttcggccgaggtcgcttgacttccggggcaggtgatggcatcgtgaaggacaagagcgatgagcctgatgactagggcgcgaccggacttgactgggctgagaaggatagagaggcaggggctaaaggagagttggctctgcgaggtcgcgacggaacgacacgcgctgcttgctagcggagtctgctcgctgaggggcatgagtgctggacgatcgccacatgtgctccaagcccactgcagtcgaatgtggatcaggcgtagcgacatgagaaattagcagccgtagcaataagtgcgcggcgtaagcccgagttttgacatcgtccgaggggcgtctggattcgacccgtcacgtcgtcgctcagaattggacccggtcgaggacaatgccgtcctgacgagcgagagagagagttttcagtcaggaagtaccgaggacgagagagactggcagggaagacatactgatcgaaagagagcaagagtccctgagggctgtaagaggcacatgcgtcccgggtcagcgtcgactgcgattgattgccgctggacctactcactccgctcttgctcttgccgatctgcaaggcaagcgtccgctcgccgctttgccgaccaatacttgtcgagaactcctcgagccagagggtcgcatgcgttaggaatgtgaagtcggccccaagcgcgggcttcgtgcgtgtgtgcggcaggcgagagcaggggttgatggtagagggaacggccgagttgaggagcttagatgggagcgtcgttcatcagcaggtggatagtgattgagacgaccttgtgcgtacaaggatgttaatgctgtgccgctgcgtaatggcggccagagcgtgtaggtcggccaccatcgtggccttggctggagtgcaaggtcgttgttgtcagccctgaactccgaggatcgacgactctcgccagatactcactttccaggccgttcgttatcatccctcctgcgtacagcccgtcaaagggatcgacgacaatcagaaggtcgctgacggcccctgcggccgatgcagcggccgatagctgcgcctcaagcgaggtcatgacctcgccaaaggtggccagatcaaacgtcgctcgaacctcaagtcgatccaagacggtctctaggagctgagaggggcgatgggtcagtgccgacttgtgtgagaccgtgcgggcgactgactgccaaagggtcgatcgcttggaggaccgccagagcgcgctctgcagcaaaaacgccctcggtatcgacccagagaacgcgcgtcgtgggagtcgccagcaaatgacggacagcgaggtggagggcgagcagctatcatgagggcgagcaggtgcgggcgaaggtggttaggacgcgcagcagaggcagcagcagtcgtcactgacagtcttgcccgctccctccggccccgaaagttcaatcaagcccgagacggtcgagaatgacttgtcgagctcgacgactccggtcgtgagccccggccgacggcgacgaccggcaagctcgtcatcgtaggccatcgtggcaaggactatcggcggcgcatctgctcgccggacggtctgctggagccgcttgagtgagctttcgcgcagggtggccgtgtccggcctctcggaatgaagcccgagcagactttcgaggagcgcttgggccggcgtgaagagcagcgtgcgcgaggtgaggaccggtgggtccagctgggcgagcagcgggagcagggccgcgagctcggccggcagcgacgaagcgagggtggcgagacgcatggcgggtgaacgagagctctcagtcgtcgatcagatgccgagctggagatggtctgtgagagagatggaggtcgagcgagtgggcgtcagacgacaatcttgagttgctgctggcttcggcgcatgatctcccggcggagccgcgacgcgtcgactcgctcaacacatcgaccccgtctcctgctgcccgcctgtcctccgccccatccgagcacagcatgtcacagtcgcagatccccgactcgttttcgcagtcgtcgtcgcagcaacagtcgcaacccgtcgcctcgacctcggccctgccgccgccgcagccgatccccgagccgcaggaggactactcgcggcgctacaacaacctgctcaaggcgctcgaggtcgccgtccgcaagggcaccaacaagtggacgtgcgtgcgactcgatatcgtagctctctggagctggcgcgctacattatgcgacctgcgaaggctccggaagctgaccgacgtcctctctcgccggccactcatcggggcgtctctcgaccaggtacgacgacttcaaacagacgtttccctggcactgccggctctaccctgaagagtcgcagtcagccttcctccagctgggtgaggagctcaagtcgcggacactggtcagtctatcacaccttgatgctttgttgacggaccctgcgagcaaagccggtcggtcgtcgacacatcgaggcaacaggctgactgcggacgtacgcttctggcctcccttcgccgctctttcctcgaatccacccctcttccaggacatggcccatcggaaactcgacgaggcaaacacgagcgagggcatgcgactgctccagatcgccgttcagcgaacactggcgcgcacagcgggaatcgagggcgcgcggccggtgacgggcgacgagtgggtgtgagtagccgtcctgtctgccgtcgaggtatcgtctgcgcgatcatcgtcgatgggaaggagttgaccagcttgcactgttcgcttgcagattgagcgagagcttaactcctgcggccatcaccgccgccttcaacctaccggtgcacgacgcagagcacgaccggctgcaagccgaactgcatgaggtaagtcattctcttcatcttcaaccagcgcgtcattggagtcgagctcggcctgacgagcctcgtgcgactccattcagctggacgcagagatcaggacgctggccgaagccgtccaggcgactgaatggcggcgagaggccgaggaggcagccctccggaggaaggtcgagtctctcgcagaggtaagttctggcgccaaatgtcaccgtcgagccgtttggtcggccagctggctgacgtttctcgtcttacattgctttccttgtccgacaggcgctcgacgcgctgcaaggcctgcaggcagacgacatgacggcgtggatagaggacaagatggaggtccaggtctgaactcgactgccgactgcctgtcttcgattgttcaaacttttcacttggcccgggccaggactattctcgtcggtcgtgcaaggggtgcacgttgcgcgccgcccggaggatccgcccgcttccctgcctgctcatgtctgaattgtcgtgttcacttccagctcatagctgcggtaagaacccagcaggaagactacacccgtcttgcaagcgaaagcactatgtgccagacattatcgagtgcagtcggttgggttcgtgcgagggcggacctttctacgcgccgacgctctttggcctctgacgctccctccaaaccgtcatcagcaaacatctctggaggacgcccgccggctctcaccctttctcctaggtcctcgctcgacgctcctcagcctcttcttccatatccttgatgatggagaaccggccatccgccggctcgagcgacgacgaggcaggtcggcaggcgctccctccggccaagatcttccccctctcggtcgacacggcctttctgtcctcgtcatcgtcttcaacaacacgagccgcccagtcggcggacacgatccagcaggtctactcggcagcctcgccgggtcctcttcctttacaggaggagcacagctatggtcagcctgcaacgacgctgccctacgagcggccgctgtcggccgcctcgccgcctccaaatcagccggccagcgcctacctctcgcatcagtcgcctacctcggccgagcctcagggctacacgccgctgaacgacatgtcggcctctgcccgtgcggcactgaagggcaagggccgtgcgcggaaccagggctgggtcgacctcgagcgtggcggcggggcgggctccctcgacgacgacgacgacgacgacgcgcacgacatggtcaaggacggctgggaccgtgtcgacggcgacaccgaaaacgtccggtcgccgacgtcagacctcgcagagtacccgccgccgttggccatgaccgaggagaagcgggaggagaagcggatagcagacgtgcgtggcctctcccctgtctgccggcctgaggcctttcctcgtccctttgtcggccgctgctgacgacagccccttcccaaacccaaacagaacttggcgaggatgcatgagaaggaggctgcccgccggcgagcggcccgcgagtcaaagcacctcaagagccatggcgcgcgagctggttccggctcgtcgtccgtcacgagcccgacagctgccggccggcgtaatcgctggagcctctttggcagcggcgattcgagcaacgtgagtctgccctctctatgttggaatgtcacccgctgactgacggtcgtacgccctttcagcagcccccagccggccacctgccgctgtcgtacactggctcgccgccgccgacggcgtccccggtcctctcgccgacatcgtcaatctacgcttcttcctcctcgcatgccgctcagcaaccggctcagcacgaccccatgtcaccgacactgccgtccgcctcataccagggtcgcgagtgggtcggtggtggcgggcagggctttcagctcggcgctgctgaccggcggagggaccgccgccagctcgggttctgggagagcctctgcgggactggccgggaccggcggcctggggacgagaacgaagacgacagcgacgaagacatcaaccagggccggacgaatccgtttgagtagctattgtgcgacatcgacgtctcccttgcttctgaccggcctacaggcccgaaggaccctctacctcgctcgttgcactctgcacctcgctcccctgcatcgctgtacactcttcccccgtttacgtcttgtatcacatctgccgatctgcgtcctcgcttgatccagtcctcacaatgatcgagtcatctagaactcgaggtcctcgtccgggtcatcctcgtccatgtcgtcgccttcatccggctcgtagataatgccgcctccgggccggccggcccgcgcgctctcgctgtctgatggtggcggcgaggcgtcgccctcgtgggcgtaggggatcggcacggccgagcgcgacgagcgctgagagggcgtcaagttgaggttgaacgacgactggggcgtaggctcttgcggcttctgtcggagagcgggagatgggcgcgatgagcgagatgaacggcatagcgacggagcggcttgggtcacccacctctgttgcctgaataggtggcggcgctctgagctccgagagcgagccgatgtcctcccacctgctggcttcgagctcgcccggccggccagccttcttcgacctaataccctcgaccgaccgcgcaacaccgtctctgcccttccgcccacgcttctcgacagcgacgacgacgccgtcggcccagccgccggcgcagtcggccgagtcgccctcgccgcgcgacgtgatcgaaggaaagatgttataccagcgcgctgtcggcgggaggagagcgtacgacgcgtggattgaggcgacgagcgccgacggcaagaggtggaggtgattgagcgtcggcgagagtgttgtcggcgtcaggacgggaagcaaggccggttggcccgcgaccggcgctggtaggggtacgagcaggagcgatggcgctggggggatcaaggggaagggacagaggtcaggacatcagtctactatgatcgctggcctgccagtagatcgaaacgcggtgcgcaccgccgagcttagtgagtcgagtgacgaggcggccgacgaggagtgccagctgcgaggccgagccgaggttggacgcaagcgtcggcggcgagtcaatgatgacgaccggaggcgacgtgcctgttcggagcagtgaaagagggagtcaggccagccgcaacagacgaccagaaagcagatagacgaacaggtttggacggcccgccagacctcggcttcgagctcagcgacgccccagctgtcgcgctccccgctgtcaaagccctcgatccagctcctcaagtcgacgatcgtcccctcgcaccctttcctccagccgagcttccgcggctcacacagcgccgagacgaggacgaccggctgtggccgagcgaggtagtgggcgataacgggcaagggcgagagcgagtgggccgacgacgagacgacgaggaggggcgagtgcgggctctcggcgtcatttgccagcagcgagggtacgtaggccgtcattgcaaccattgccaggtcagagtgctgggttgaaggttacgggtccaggagagcgacagagctggcaagacaagttgtggtcgaagggccgaacgaagtcggagctctgcgcgcagcggccactggcggcgcaggcatacgtcctgcgtggcggccttctgcacatgtgctccttgcgatctcactttcgaggcacgatccggtgtgcatgatgatagcacaaggtacctgtgctcgactctatgtgtgattcgtctgcgcgatgcggaaagtgccgtacccatcgtcctcagccgcaagcgttgcttcatctgtcggcgacgagccagacggtcctcgaccggcagcgtcgtgcagtcggcgtcttgaccagcttctgctgaggcttcgctcgagcttgccttccggagatgcagctccaagcgaggcggcggtggaggcccgtggcggcgggatgtcgacaatctcgctctccgacagctcgtcctcggactcggcctcgtcactcgcatataggcggtctgatgggtcgttgttaaaggattcgagacggctcgatgtaatgtcgaatgagaacgaagatggtgcctgaggatggaggttcgcctcagttgcgagtctggcgcacgtccgccgatccatcaagtgtcaaagacgcacctgacggggcggtcgaacaccgaaagttctgcagcctctgacaccaggaagtctcgaggcggccttgaacgagaccgcttcttccgcaagcgcgaaggcgaggttctggccaggcggcgtgcgcaatcgggcggtcagcgtccgtgcaaagtggtctgcaagggcgcaggccctcaggtactcacgacacccagcagaataacttgggcctgtgagctcgctgcgcccattgccagaagcatcgatgacgagtggtgcagcgcttctgctggcagggtgactgcgagagccggcccgtgcgcagcgaggtcggccgggcgtgcgcgcgtctggtagaggaggttcagctcccaaaggatgacgaggacggtgagtgtcgacattgctggagaaagaagggtaagtactgctcagctttgaccgactagaggagcgagcgaggcagacgcaccagagacccagcctccgccgaaccctgctaagctcgagtgtcggctccagccgacggcagcaacgatggccgacctggtgacggctaccgtcgttgatagcaggagcccatcgccgtgattgagggtagagagaactagcgtcgccacgaagtcgagcgcggccaggagcaggagagtgtagggccagtcaggagaaggccgaggcggcgtcggacaagccggtgagggaggcgaggccggcgcgcgcgacacgacgacgaacgacgcggtcgatgtctgggttcgcaggcctggctccgacagcatgaccaggagcgcgacctgattttatgctctggcgtcttggcgttgctgaggagggtcgacgagatggtctagcggaggcagggctaaaggagaccgaggcagcgacggcggcgcgcaggcccccgacctttggccgccttgctgcagctggctgccaatctcgccctgaccttcatcttcagtccatgatctcctcatggcgctcatcaccgacgcagcgtgagtttctggcagctcctggtgtggttcctgatgcttttgattgcgggcgatgaggctgacgtcgagctattcatccacctgccgccgctgccgccagatacgtgatccaccagctgcggctctcgcatctgcggcacggcaacgatgccttgtctgccggcatcatagaccttggcgagagcgcgagtggcgacgggccttgggtccgggcaacgggcggcagagatgtcgagcggtgcgtcgttcgggagccgctgatcacccatcgcgagcgtgcgctgacagctcggtgtccctcgtcctctgctacccttgctcccgtagctggcctgagctccagaccgtccattcgccgaggatcaacgcccatgcctcctcgtcgcgtgcgccggcgctgcatcaccagcggtcgaacctgcaacgggcgctgtcgacacgcaagccgcgatgcgaggctccgcagcctccgccgccgccgacaggcgagggcgcccagctcgcctaccggccgaccatcgtcggtgccggtcgagcactcgcaggcggggctggttaccgtgtgtcgggcgttcgcgccgtcgaccaggccgcggtagctggatcatcaggaaccccagcagacggccggccgcgcctccggacgacgcgagcgtccgagtcgagcttcgcccgtccccaaatcgctcggcctccaaggctgcagactgccttgacgacggacggctcgagtccgacccgcaagcgatcagactccgagccgatccctggtccgcacacggtaccctcgcccctcgcgtcgtccttctcctcgcgcatgccgggcgggacaaccggcgacgaagagggcagcagtcagcatgacagcgcggcctactcgacagtcggcgaggacgagggcgaggaatatctggaggacgacacggcgctcgaggccgaggacgaagacgccgaggagggagccgacggcgtcccaaccctcggccgacccttacgcatccagctctccgaacgtccgcgcagggacactgatgcgagtggcatgccgaccgagggaggagacgacagcgacggcgagatgggaatcgaacgcgagcaagaggacttgcttgacggcttccgggaggagaccgacgtggctgacgccggaggcctcgataacggtggggaccggcccgagcagaagctcccaatcgagagcggcgcgatagactcgtcgaaggggtcaaagactctcttgtaagtgccgctgggcaatcctcagcagcgcttgactagctatactgacggctcggcccctctcgacgctcaggaaaccaacgctcgaagcgcagccttccttctcgcacctcaaggtcgggcttcgatcgccagcagcggcaaagccatctggactctcgttactgctcaaggcatccgagtccaagacgcttgcgcctttcgccgcctatgcgcgcgtcctcccgccacccaccggcccgggcggcacgtcgaccccggtgccgaccctctcactctcgctctactttccgcactcggatcaaccgagcaagccactcaagacgctcgtacgtaagctttcgaccgtcgaagaggtcgtcggtcttggtctctttctctttggcgaggaggggcgaaagccagcgctcaaagcagggctcgacgaggagggcagccgcgagtgggagatcaagctcagcacacgcggctggggtctacgaatcgtcgaggacgatggagaggtcgacgaggactttcccggtgcgtcggctcgtccttttctagcaagggctctcagacgactgacaagccctgccgtcctcgcttctcagccctcgaccgggacgccagcgtggccaagttctcgttcctcgagtttgccatcactcaggcgaccccgacgcaaagtaggcttcgtccggcgtaacttccgatcttcccgagtgctgactgcaatattgtgcccctcttgcgtcttgtagtcgagcaaaacgtcgccaagaaccctctgccggttcgcccagccgcagtcactcgcccatcaaccacatcactcgcgccgccgccgaacacgctcggcgttgcgcagaactcgttcacggatggcagcttccaagagacgagtcccgttcttcggccgagcgctgctcctggtatacccgtgttgctcaagatcaacgttcgtggcggtggtagcacgcgcttcacaacgaccatcagcgtgttcgtgacttctcagggtcgagcggtcacttcgatcgtctgaacgctgacctgccctcacctcacaggccttccgctacctacctcgccgacgtcgtcgagctcatctgcaagaagaggcagatggacgacccacccaaggactgggtcctctgccttgccgacctatcattcgttctgccaaccgatcggacggtcgagagcttgatgggagtcaccgatctcgctctcgtcaagcgcagctgggctgcgagtcatggtctcaagggcgggggcgcgcgcggtggtgatccgaacggtacgtcaggcagcagagagtcagcgactcgcttcccggctgaccaggtccttctctgcgctccagcctcggtcttcaaggactttcacgagcagcgtcgcgagccggcgaccgtctctggctttgattcgccataccaggtccgtcgtctcgacgcaagctaccgtgcgccgcatgactgacataccggctcgatcctctcgccgtgcagaagttcattgttcatcggaaggcacccatcggaaggcacgagcgggtcctggccatcgatggagactgtgggtcgacttggccttgtccgctctttcgagggtttaagctgaccgcctctcttcgtcagacatccacctcgtgcgtcgacacctggccttgactgtcaccagctcagccggtcgcctgctgatcaaagttcttctctcccccgcagatgccgcccgagggccgagcactcggcttcacgacctcggtccggacgagctcgttcaacatcagcgcgatcgtcaacgtcaagcagtcgcgcaagacgccgcagaacctcaagattgccgttgctaaggagagcggcaccaagacgtacgagctcgaagcagaaaacccgcgcatcgcctccgacattgtcaccatcatcaaggacctgtgcgtcgcgggctctccctggtcgagctctgccaagcgctgattgctatctcccttcacagaatgcgcctgtacccggccgctcagcgccagcaaccggccaacttgctcgcgccgctcagcccaaacaagatccggcggcgaccaccagcagtctgagactcatcgcttcttctcgtgtcacatctgcagccttcttacattatcacgaatccgatgaccagcaacgatcagagatagagcgggcatggatagcgagcaggaagaggtttcatacgaccgctgctcgagggctcgacgtgccaaacgcaggagggagccagagggggtcgcggtcgagcgacggtgcggttgacggccgcctggagctacgtcgagtgctcggagatgacgacggcgtcggctcatcgcccgacacccatgacaaatgccgcgtcggctgctctcgacggattactggcttgtcttgccgtaccttcgccgccagcgacgagccgctctcgccgtcgccgccttcttctgtcaccggcgccggtccgtcaggctttgcggagcggaggcggccgcgcatcgaggcagctcgcaatcccgacggaggtgtgtgcgagctgtggcccgagtcgtacgaagaggaggcctgcgggatgggctgatgggtgacgacgagcgacgccgacgacatcaagctcggagcgcagcggcagcgcatgacgaggtcggtcgtgcctctggcccgcgtagatgccgaggccgctgaatcttctttgaagcgctgagaagctgtttcgacaccgctcgtcgacgcagagcgatgcccgtggagctcgccggcgcgaagcgactggtgaacctgccgacctgctcgcacagttccgacctcgatcgacgttgccggacgatcgatgtcctcagtcggcgatggagcctgcatctcgctgtgcgggacctcctggtggagggccaggccgaggttcaaacgctggcgggtggctttgcgcggcgtcgagccgtcgagcggcggcgggtaccgaaggactggcggacgaggacgaggcggtccgtcagtgactggcttggcttgtagatgatgcttagctgagcaactcaccggcctcgagccaccaccggaggttctgctcctttggcgttcgacgtgcgcggtagattgtgccgtcaatgttggccggcacgcgcagctcaaagggacattcgcgcgagccgagcgcgccgccgctgcttctgctgtcgtcctcgccgttacgttcggcggtctgccagagaagttgggatgcctcccagaggaggattgctcggccagccgatgactggctctcggtgcaacgcaggcgaacctcgagcagggctggcctggtctcatcggccggtccggcggcgtgagcgatggttcggacgacgccgacgatcctgacctcctcgaggccgagcgacggcatgcttgagcccgagaggtgctccaactggagctttgcttcagacaccctcattggacgagagggcaagggaagcttagggaggtctggagagggacgtgcacgcccggttaggagcccgtgtttcttgacgaatgggacagcctgctgtgcacgcacctcgagtgatgggtttcgtttgcttgaggaggcgtgggtcaagagagctgctgctggcaaaaggaaggactgccgtgctcgtcgttaaaggcagggagaaagcacgtccggctcctgattcagccctagcctgcgccggggcgtcagcatggctccccttgatcgagacgagaggtcagtcccctccgcgggtgtgtgcgagacgtccttcagcgttggagaaggttcgtgctgccgtcgcgctgaaagggacggtcggcgtcggaagcgcgcggtgacccgcagctgaaaggcctcggcctgggagtcacgtggccgtgttaatcggtcagcaataccactcacgatgaaagggggcgcgtcaaagagaacgccggcggtcgtagacagcgaggatgcctgcctccgatgaaggggaggcgccattcatgcggcgtctgctacgacgaacgggtgacgtgcaacggtgaacaggcggcggctgccaagacgacggccgctcggcgcgagcttggtcgtttgcctgccagcgacgacggtcgaggacctggctgagcgtctcgcatggatcgcgcgtcgtttggacccagatccagaccgaccgagtaacgagagcgagacgaagaggcgttttacgaagaaagcgactttgcgatagacatgtcgccgcttcggccgtgatgcccgggtcggaacggggcaaccgctttgggcacaggcacgaaggcgaagccgtcgtcgcgggcgatagacgtcgcctcagatcacagccgcaaccgcgaccaggcccatgaggtcgccaagtgtcgggtcgattaagcgcttgctacggacgaggcttctacttgaggccgacacgctcgcgctcctcctcgagctcctcaaggacacgcgtcaggccacccgtctcccacctgccccagacgaagccggtgatgagcgcggtgacgccgccgataccgacgagaccgccaaggaggacgaagatgggcgcaatgtacgaccgcagcggcaggaaggcagacgagacggtcagggcgatcaagaggacgatggcgctgcatcgggtgaaggttgtcagcgtgagtaagagattcagcgttcgctgcgaaggcgcagacgcacggaggggtaagagcaaagagctggttggcgtgccggacgtggaccttgcggtgatggcggagaacccgccggagctcgtcgtaggtccgggcctgggcgtcacttgctttcgtccgtcgctcatcgagctctgcgagcggtgtcgaggacgaggctgaggcgtgcgacccatccgaatcggcacccgacaacgtctggccctcagctgaggcgtctgcatcgtttgagtttggcagaaggcctcgcgagggaacgatctcaaagcgcgcccggacgccaaagtggtccgagtacgagtaaggcttgcccgggacgagcccgcggacgaccacctcggcatcgatgcagcggagctcgaccgagggcggcggcggcagctttgagctcaaagcggttgaggtcggcgccgagcagaggcagtctgtccaccgcggcgggcaggaagggggccggtgaaagacgtagtcgagccgcttgccctgcgtccgtcgcactgcaggcgggatgtccttgccccaggtccaggagttgagcggagctgaagccaagagcgttcgcgtcagtcagcagacagtacagcgtcggcggcgaagcgtcgggagcctcacagtcgaccgtcaccccggcctcatcgagcgcgtgctccgcgtctgggatgcccttgccaaccatgtcccatcgctcgacgtactcgtcgtgcccgccgtcgtcgaactcgcctctcttctcagcccggcgctgagcgaactcgatccaggcgtccttgaccttgccggcgtcgcgcaggacgcggtacgggagttcgttcgactgaaagttgaagtcgccgcaggcgaggacgtagcgcccttgccgggccgagcgcgtcaggtacttgctgagctgccatgcttgggaggatcggtatgagttgccgagctcgtagccctcgggtccgccggcgtgcatctgaggaagacgacgaagggagtgtcagcgcgcagaagagtgcgttgctgacgagcatgccgacggacggacgtgggtcgtgtagatgtccatctcgccgatctctgggtgctcaatcatgatgcttccggcagccttgttgacgtagaagtcgctgaagccgagcggccggccggtcaagtggtaagggatcgtcgtcgactcgagcagcgggaagcgcgagaggatggcgaggccggctccgagtgcgccgctgccgacccagttgcaaagagagccgcgccggttcagcgacggctccattcaagccgatcaagagagttttcctacgcacgacgagaagaacttgccgtttggaaggacggcgctgacagcctcgcggacaagctcgaagtcctgccgcacccagatctcttgcaagcagacgacgtcatacggactcgagcgggcgaggagctcggcgatggcctagaagggccgccaccgagtggcagcgagtaagcaccagcctctctcattgcatgcagccgaacgcaggcgaagccgtatctgagctagatggaaagcgacggggccgcttgagcgagctcgactgacctggatgcgctccttgcgaaacttggagatcggtttcaagcccctgtaccggcagccgaagagaccgtcagcctagacgccctggtacaaaggcgggtcggccaggtcaccacgtaccagcagttgagggtcaggacctcaaaggtcgatggtgctggcgaggacgacatggcggttgggcgggtcgggccgacacgcgcagcgctcgacaaaggggttcgcccggccgacctttctctagctctagcgaccacactcgtcagacgaatgatcagcagcaggaccctcggaggaagatgacgacggccggctactaccgctttagcgatgtcatgtgggagtaggtcatgcggccgactggctagccgtcaagagctcctctcgctgtcgcagttctcgtgcgcttgcgctgaccgcctcccttccgtcacgcctgtcttccagatggccaaagtacgacgacggcaagcacgtacggctcagcctgtcgagcctgcaggatcgttgcgcatcgaggctgactccttgatgccttcctccgggctgctcgtgccctctccaggagtcagcgctcaagtcgctcttcaacccgaccggcctgacggacgttggctcgccgcttcggtcacctggcgccgatggaatcgagctctacctcggtcggtccgccttcttccttgagcccgctggacgggatgagtaggggacgagctcaccaggcgcgatgaggcaggcccccgaaggcttgcctcctgcgacgcgacgcgcgcgcggcgcacgagcccctgtgctcgcacttcacgcagccccgtcctcgcctcgaaagctgtggccgacgtctcgagagggcttcgctgaccttgctgctgctccgaactatctaggcgatttcccgaaccggcacaaggtgctgctcttcacgtcacaccagatcggtcagtgccgcgtcggcgctcgcaggttgcgcagaggcctgaccccattccgagatcggccctcttcgtccgcagagtacgcgcggtacttccttcagacgacgggtgtcgtccggtgtggcgagacgatcaagctgccgagctgggagtatctgcacccggtcgagaatttcgtccagccggtgaatctcgcgtcggactgagagcacgccggtcgagcgtgtcaagtcgctaaccaagtcatcctccttttggccgcagccgacgccatgcctcttctccaagccgcaagagatcaaggatattgttcgccagctcgacaagcacaagcgcaaggtcaagcaaggcggcgccggcccgccaatcgacatccgtcagtcgtccggcggcaaggcgaccgctggatccaaggcgggcgcgccgtcctccaagagcgcctcgaagaagccgcaggctgtctggaaggccaaggacgcgctcgaacggacacgcgaggcctggcggctgatgaaagagaccggccgcggcgccttcctcgcaatcgactttgaggtcggttcgctacttttggcgccggcctccgcgcttgacactgacattacgctccctcacagacgcacgaggtgcagcagcaggttgtcctcgagtggggctgggctggctcgcgtgtcgacgctggcaagctcaaggatggatgcgggcactacctgtgcggcccccttggcgttttgtcgagcgcttcgcgaccgagcgaccgctgactctgtcctcctcccgcagcgcgcaagaccaccttctcacgctctccaacggcaattatgtcccagacaaccgcaaggtcgggcttctccctttttttagacaaagtcagcttgccctaacctgacgcgattttttttttcccagcgataccgcttcggcgagacagaggtggccggtgccggcgactttgacggccgtctccgcgagctcattgagacctggcgcgcgcacgccgaagcttcgggagggccgctctacctggtgcgtatctctatgcggcaagactcctgccgaacgccaggctgactctccggggcacaatgcgcgtcaggtcttccacgacacgactggcgaccttaagacgctctcgcggatcggcatgcccgaccttgccatccgtgacgacctcccagtcttgagtgaccttgccaaggcaggtgatgtccacttcgtcgacacgcaggtgctctacgatgccgtcgttaagctcggcgggagcgacgagcgcagccgtagccttgcgacaatgagccagcagctcgctctacagctgaaggcgaccttcttccacaacgctggcaacgatgcccacgtcaggccgcctcacctttcaaatccttgcggccgacaacgtactaacgctcggtcgtcgatccctctgatcctccgcagtacacgctcgactgcctcaagctgatgatggagcccgaggtcaagctcgtacgtcttctgggttcgattcggcgccgattctgccaatcatgactgacctcgcgctctctacaggcctggatcaagtcacagaacgacaacgataccctgaactcggacgacgagcccggaggaatgatctaaccgttttctcgtcgcccactcgccacgcctgccgcaatcttgtgcctctcttgaaccatgctttcttgacgcacccttcgtgcatcgtcgttagacactgaagggagagatcatcgtttgaatcgctgccgaagcgccaccagccgctcgtgcggatcctcgccgttccacagagccttcccgccgacgcgactgacaaccggcagaccgaattgctgtacgacgaaggaggccgagacggaagcgtacaaattggctggtgttcgaaggaagtttggcatcagcaaagtgcacaaagtaagaacaacggcagcgcttaccctcgtaaatgtcgccaccagtgaagctgaggccagcgatgagtccgcctaggaaactgttgccggcgcccgtcacgtcgcgcaccttgtcctgctcgcctgagaaccagaaggcgggcacccaactgaggccggcttcagggtgcgaggggtggcgaccgacgagtgagccgagcgcaccacagcggaggacgacagatgaggtgactggcaggagcgggcaaacgagaatatgatgtgcgagctcttcgtactctgcaggagattgaggagttgggagcgagaagagggctgcaagaaggacgttgggtgatgtcagtgatgctcttcgaggagaagtgaaagcaaattcggggccgcaccggccgcctcttcgtgattcggtgagcagacgtcgacgagcgccagactggccttgaagtcctctagctgatccggcctgcacgtttgcggatgcggctcccagacgatagccggccgccaagttgacaaagggccgtcagatgggcttacctcggcgcggatggcggcgagttcagcggcggcggcttcgactgctgctggggcagcacacatgtggatgtaacgagcattcgcgaggggtgtgtcaaggaaggagcacgggctgatcggtgcaggctgattgatgtacgcaaagctggagacgtttgaggaatgggtcagccgcatcaacgcccgcacaggcgcacgacggggacgcacctgcgcttcccgcctcgatagacgatggctgcgctgccggtcggacggccttcgcgccagacaaagagatcattgccaaagtcacgctcgacctcctgaacctcgctcggcacgttgccgtccgagtcgacgaggatccgggcctcgcctggcccgccgagccaaattcgcgcgccgacgatggcgtagaggccgccgcctccgatctgaagcgagagacaggtggtcaggaagcctacattccaagcaggagcgcccgctaccatttaccttgcgggctggcggcttcagagcggtcccatcggcgtcgagaaactgtcgggcccatcaaaggggctcttctcacccggtcagttctcagccccctcgcccgacctcgccctgacgcacctcgaagcagtcgacaaggacagtcctgcaagcgcaatcagtcgttagctctcgtcgcatcacgaatcagcctatgagagacgtgccctgtcgaggtcaccacggtcgtcatggccgtttgtgggccgcgactctcgaccgaggggtctcggctagcttgggcgcgggcccgctgcgcctctctttgcgcgccgcacctctctccccgcgcccagttggctcctgccgagagccagttcgaccagcgacccgcttccctctccgtctcgagccaggccaggactcttccatctccactacagcgtctcgttcttgtcgtcgctaggtacgtcgtcttttctcgaggtcgtcttgaggccaggagcacgagatcgcctgcggtcgcagcacgagcctctctccgcgcacaaacagcccgcccggtcgtccggctcatctcgctctcgtcggctggtcagacgaccgcctcgggaagcgcctggtatcgagaaggattgacaaggcaaagcagacggctggcttgccgtcgatgcgaaaggatgatgagctgacacgactcgcgtgccattggaccagacgccgggccctcttccttccaggttcaccaactgctccgccattcgcccggccgacctctactcttcgcccagcgcccgccttcttcactcttccagtcccgctggtcagggcgtcagccacgctccttgtcgccttccctatcgtcccttgcgcggtagcctagcggtccgaccttctccctccgaccgccgccctccctttcaaccggtgtcggctatcagcagtagcagcagccatgtcgctcaagaccaagagcaagccgatggacggcgcgtccaccggagcagggagcgcatctggccagcagcctagatcctctaaccaagctggtgcaggagcaaagtgcgtttggctttcgtccctcgcgcccaagctcccggccggccggctgactgactggcgcgtgcgatgaaccctctttccctcacccaggccgaagcctcgcttctcgtctccggctggctcgccggcatcgccctccgccacgagcgggaatctcccttacccgtcttcgctcaacctcagtgctaacggcccgagctcgcggccgagctcgcgcttgtcaggcacgctctcgcccgcgcctgccgcaccggctgcggcgccgcctcccaacgcctgggcgcagaagccgaacttcgcatcggccgctcggccgagctctgcagcttcggtcgcatcaaatgccgggacggttgcagctgagccagcgccggcttccagtaatggagatgcggcggctggagctcctgagaagcccgccacgccggctccgggccaggcctcgccggccgcagcacagtcgccggcgccgtctccggcaccagctgcgaccaacggcatgccagcccagattgctgcggcgcagagtcttctcgtacgtatcagccgttacgagaaaggccgcggacgtcacgcccgtcgctaaccgacaataccgcctgccctctccagaattcgcacgtgacgatcgtcacgaccaaggagacgtatgacggtatcctgaccgacctctcgcgccagatccagcagaagggcgcggcccggccgcatgtcattctccagaaggcctgcatcaaggggatgaagcgcgacgtcatgatccgcgagtggcagggcgcctacgacgagattgtctcgatcgcaaagtggactctagacccggcggaggcgagcccgatgccgtctgctggcgctggcaagggccggagatccgagggcggcttccggaccgacgccgacatctcgcgctcggctcagctcgggcaggagcgcgtgctcgtcgcctgggacgctggctcgcccccgcccgcctcggcaggtctccaaggcggcctcgatgccgacacgtttggcccgagcgcaggcgcgagcggcggtgcgagcggcggcggcaagaagggcggctgggaccagtttgccgagaacgagcgccggtttgggaccacgaccgactttgacgaggagatgtacacgaccaagctcgtccgcaacggcgagggcttcaaggaccgagagcgcaaggccgaggccatggctcgcgagatcatgggcgtgcgtggccgctgcgttcgaagcctgctcccttgcttgcgctgaccgaccgacccaacggtgttttgctgcagaccgcgagctccaaccctcacatgcaggaagagcgcggccaggccgtcagctcagcccttggcgaggaggatcggtgcgtgcccgccgtcatcgtctggccgcactgtcgatcggcagctgaccatccacgcttctttcgttgcagctactctggcgtcgttcggagcgccaacgcctacgtcccgccgagcgcacgcaagccgtcagctggccagatgccgccttcgcagcaggcccccgccaccccagcggcgccgccggtcgtcgttcagcggtcaaactcgcccatcatggacccggccgtcgtgcggtcgtcctcgggcggtccgaacgcggccaagctcagccctgccgccccagcactgaccaaggcgccgtcgtctggcgccaacgagggcagagtcgacagccctgtgcgtcttgcagcgtcgggtccaacgcgtcacgaccgatgctgacattcgtttgcgtccccgcctcgcagagcgccgacaagagcgtgctcgccgcgttccaggactttgtcaagtcggaccgccagcggcttgagcaaaagaagaagctgatcgacagcaaagtcaagagcgagaaggacaagaagctcaaggagctcatgaagtttgggcaggacttcaaggtccgcccgcgtcgcccccggccagctctccggtttaacgaacgactgacgaacccacgccctcccttcgcatctcgcagctcaagacggctatcccgcaggacctcgtgccgatcctcgcaaaggacgccgagaagcagaaggccatcgtcgagaaggccgcggccgacgcgctcgccgccaagtcggcgcctccaccaccaacgccgtctcctaagatccgtctcgcgcccagcatggcctcgggcgtcgatttttcgacgccgcaggcgcaggcaccggccaagggccggagctcgatggtcatctcggacatcccgccgttcaaccccaacaagcggcacggcgccctccccgccggctcgcccgcaccgccctcgccggcggcttcaatggcgagctcgaccggcgcccggagcatgaacgccggcgcccagccgttcgtctttaagccgatgattcctgctttcaagccggcgtcaggacggtcgcccgtcccaatcgtgcgcgagatccctccgttcaatggtgggacgccgaagggcacgccgaaggccggtgctgcctcgctcgccagctcacctttgctgcccaaggccactgtcgtcggcaccccgacgcccgctgcggccgctagcagcgccgctgctacttaccctgcggccgctgggccggtcaaccctttcttcggcaccaaggtcccgaagcggagcgatgtgcccgtcagcgtccgggtcgacttcaacccgcaccggatgtcgaagctggcgatggcgccgtcgtacccgcccaactggccgtacggcgcccggtctttccgcgcggccttcccgccgatgttcaccgcggccgagcagcacgacggcagcggcgagcacctgatgcagccgcacctccagcagcagcagcagcagcagcacggccttcacccgcaccacccgcagcaggggctcgtcatgggtgggccgggcggcatgcagcctcatctcgtctcgccgagcatgctgcacactcagcctcagggcatgtacggcggcccggcctacggcgctggaggctactaccagccctaccgctttgcacctgtcagttctcgcgcgtcttgctcccaacgctttgaacgctttgctgacgactgcgactggccttcatttattgttcctgtagcagcctggcatgccgcaaggcatgagcccgaacgcagctggcgggccctctggcagcgccaacggcggcaacaacgcccacggcggcggcgtctatcatcagcagcagcagccgggcggcggctttgtgccgatgttccagccgggcggtggcccgcctggcgcggctggcggatcgccctacggcgtccaggtgatgatgctgccccagggcggcatgtacgctgccagtcagtccaatctcgctcgccgtccctacttacgaacagagcgtcagaaggctgaccgacggatttgtcgccacccctctagtgcccggctaccagggccagcccggtcagcagcagcagccccagatgggcggccctcccttcgccggcgggcaggcgaacggcggtcgggcaggcggcgccggcgggccgatgggcttctacccaatgcagcagggcctgggaggtcacccggggcagcagcagatgcagagcccgcagagtacgtcgacctcttctctatcagttctttcccagtcggcaaagactgaccaggcttgcgccttccttcgcctgcagtgggccacgtctaccagccgcagtttatggctggcgggcacatgcagcctccaccgcatttcaatggcggtggcggaggaggccagccgccgccgccgccacagcagcagcagtcgggaggtcagcagcagcagccgtcgttgggcggcggggccgagcagcagagctaggtcgggtgcgccgaggagagagggacggggagcgagaggagcggagctttgttgcgagagatgaccctttcagagatgagcgagcgtcgtcttggctggacggtcctgtcgttgctggcccttcttcgctcgtcgacgctaccgcagccactgagccgtcgtcacggcgggcgatcgacgctgtccggacgcgaagcactttgcgcgcggctcaaaccccgccggcggcatgtcgccagacagagacccttccgaccctcgcccctcctgccccgtcgtcagcccaactgccgtgctctccgcttccctcctcgtccgctgccagtcccaagcagcgcccgccactcgtccgtctctggcactcaacaaaactagtgccttgtctcttgcccgcggtcggacaagaatagcctcgcctctgcgcgccctcagccaacccggcctcagccccagcgactgcagcctcctcctacccttctcaagaccctggcaagctccggtagcagtcagctcgcactagacgcctcctagactcccacctcctgcgacccttgccgtcgcgtctcgcccgcaatgctgtgcgtcgcatttatccgtctgcttcaggccgtggcgcgcaccccccgcgccgccgcgcgcctcctctcttgtcttcttgaagctgactttgcccgactcgacgcctcttagctacctcacagcagataagtttgccgtttgtgagtctgccttcgacttctgcccttatgctcgcaaccagcgatcatgagggcggcctgctggactggcatgctcatgtgcctcgcaccggcggtcacgtcggcggcggtcgctgcctccaccccttcgcaagccaagacgctgactctcctttgctcgaccaacgctttgcctacgcccacgtccagtcgtgccgttcggtgtcatcgggtgagctcttgccaaacttcttgtccgggtcgagcgtcgaaggatgggttgtcaactcgcggctggctcaaatgccggccgacgtcgcgccaggcgcccgcagcagctcgacgaggatcaacttgctgaccgtccttttgcgctctcttcagattttatcgctacctatggtacttgatccgactgctggcgatgtgggtctacaagccggtaccgctgccgacgcacccgacctacattgcgagcgaggacgtcaccatcatcgtcccgacgatcgacgccggcgaagagttcaaggaggccgcccactcgtggctcgtcggcaacccaaaggagatcctcatcatcaccgaggagcgcatggtcgggccccttcaggagctcgccaatgctgtcaacccgaacaaaattcgcgtcctgacggtcccgtttgccaacaagcggctgcagatgtcgcacggcatccgcaacacgacgaccgacatcatcgtctttgccgacgacgacgccatctggccgccgacgcttctcccttacgtcctcgcgtgctttgaggaccagcaggtcggcggcgtcggcacgtcgcagcgcgtccagccggtcggcgacaagctcacgctctgggaggtccttgccgccttccggctgacgatccgcaatatcgagatctcggcctcgacccacatcgacggcggcgtcccgtgcctctcgggccggacggccgcctaccggaccgtcatcctcaaggaccccgagtttctccacggcttcaccaacgacctctggctcggcaagtaccacctcaactctggcgacgacaagtttctcacgcgctggatggtctcgcacggctggaacacgtacatccaggcctgcaaggaggccgagctcctctcgaccatgaagcccaactggcgcttcctcaagcaggtcctccgctggacgcgaaacacctggcggtccgacttccggtcgatattcaccgagcgccacatctggacaaagcacccttacgtcgcctacacgatgatcgacaagtttatcaacccgtttacactcctgctcgggccgtgccttgtcgcctacatcctctacaagtcgaccaagaatgttgacgacggcggctaccatctcccggcctggaacatcctcatctcagtccgtctactctctgcaattcaccaccgatattctcgtactgaacccgcttgcgtctctctcagtacgccgtctggcttacggcgacgcggacactcaagctcctgccccacctttggtaccggccgcaggacatcatttacgtcccggcctggatcgcctttggctactacttgtccgtttatcgtctctcactcacaaggcatcgatgtgctggccactgaccccgaccctcaccctttgcagcgccgtcatgaagctctatgccgtctgcacgctccacgagacgggctggggcacccggacgggtatcgccgacccggcaacggcgacacaggccctccaggaccagaacgaccgcgaggcggccggccggggcgagaagtatggcggccggcccgagcgcgaggacctcgagctcggcggctttggcggccggcagaaggcggcataaacgacgtctgccccctgctcgctcccactcgtttctcaggttctgcacacatgccgccttctatgctcagctgtacccctagattgcacactcatctgctcctcaccgcactatcccgccaacgctccttcctctccctcctctgctttgaacgcatttcgctctgctgtcttcctttgacgccgctccttcctcgctctccctttcatggacacgccctccgcagctcccgccgcgtgccagacacccctagatcttccttctcacgccccctttgtgtgcaactgcaacatcatgctttttcgcagacgacctcagttgaggctcgcgagaatctcgccttcgacaacccagccatcggctggccggacgacgacgccggccttctcgagtgcgccgagcgtccgaacaaccatgtcggtgtccatgccctcgagctcgctctcgtagccaaccgtgttgagccaggcctcgacgtcggcccgctcgtagccaaactcctgctggataaaggcaacgtcctcctcggcccgggcggcggccgagtcaaagtgccggaccgacgcctggagctcgccgaggaacgtccggacggcctggcgcgagtcggccgagctgagtgtcggcgtcgaggaggcgattgaccaggacggccagggggtcgggaccgagccgatgaagcggatctcgttcaggaagggcttggtcgtgtaccactcccacatctgctcagacaaataaaaaggtcagagtcgttgcacacgaagcgcggttgagtgcggtccgacgcacaaagtaggccgatgagccgtcgttgaccgactcgcgcaggcggacaaacgtctcgttgacgacaaacgaaatctcctcgggcttgccctcactgtcgacccagcccttctgatcagccatgaccttggccatcacctacgacaagaggccagcgggatcaatgtcagtggcagaggttagtgcgacgccaaccagaccgagaccaacctgagagccgctgcagatgacgagacagtgacagttgaacggcggtaaaaaggttagcgaagggcgactgtcaagagggctcgacgagcaatgataccgcacctgccgttgcgcgagatgccgcacttctcgccccggaggtcgtcgatcgactggtacttggtgtcgaggccggtgatgacagccctggtaggcacacaggagccactgtcagtcgaacggtcgggcagtcgcgacgaccgctgcgcggcggacaagtctgctcaccagttgagcggcgtcttgacgtagcggccgaccatcttgtaagccttggaacccttgactatgcctgcgatcagactctcggtgagagcgctggaaggagcgtgtggcagagaacgttcagtgaggtgggcgagaaatcggcgaggagcccgggacgcacatggagacgtcaatctcgttgtccgtcaggcgctggatcatctgacccgtgccggctgggcaggggaccagaacaaatgtttgaccgccatcctttttggcgagctggagcagcggtgagctgaagtgctcgggcacgtagccaacacgctggagacgacaggccggcgacgagtcggacggacgccaggtaaagcgacgcaagaggaggagcggccgacaacgtcagcgcattgaccccgagacacagcagcagaccacgtacaagaggagccatggttgctagagacctttgagaggaggttcttcaagagatgtcgtcggagggacgggccggctcagcccaagtcggcgagctccgttgcgcagcgccgccgcccaccaacacccatctacactctcctccagcatgttcgccgggatcagccatcaagacaagcttgccttctttgagctgtcagtcatttgcctgtctgtctgtcgtactggtgtgctgacgctggcggttcatgccgctgggatcgcaggctggacgagtgcgtacctcgctcgcgacatctctcggcccgcagccttcctccctcggccctcaactacctcatccgccccttcagagctaacccctgcccaaccgtccttgtccgatcccggcccctctacgaccctctcgctcgtccaggtactttgagacgcgaccgcagcaccgacaggcggccggcggcccgtcagcttcgagcgggacgaccgtctcggccgcctcttcgacgcacaccaacttctcggtccccaactcggccatagcctcggtcggcaacgctgcccgtgctcagctgatgaatcagatccgtgggccgagcgcacagcagcaggacgcaccaggtgcgaggcccgcagggggttcgaccgcgggcggcgggtcattgtcatcggccgctcctggctggcagacggccgggatggggctcatgtcgaagggtctcggcaaggctggcagtctggcctcgggcttccagagcacgccttcggacggtaagggtccgcctccggcacctcctgccggacggaagggtgcaggcgcctcgggcctaatgtcgagcaagtcgtttggccatgtcgacaccgccaacaaactgtctttcgccaagacgctctttaacgaccctcagaagcagcgtgcgtccgggagagtggctcactgatcttttacgcgactgctaatctcggtgtggggccgtttccagaggtacccgcttaccaggagcctcctcgcgcgacgccctcggccgcatatcgcagtcaggcatcagcactcccgccgccacctacccgaacagccgcagcccgtgcgccatcgcccgaggccgagcaagaagagggcccgctcgccgaggctatctacgccttctcgtcgaacgaggctggcgatctctcggtccgcgagaaggaagtcgtcatcattgtcaccaagacgagcgacgactggtggacgtgtcgcaaccggcagacgggccaggaaggactcgttccgagtgcgtacatgaaagagctctgagcggaccccctcacgcagggagcgcgggcggcgctggatggaacatgactccgcgcaggccgcacctttggttgcaagagcaagggcttgctccgtctgatggctgctagggcagtccagcttcagcaaacacgtcgaagaagagatggcaggggggcatacgcatcgatccctgtatcggaggttgagaggttgctgggtgcttttttggggttgcaagaggtcttacattgcggaggaggcagcgtgggttcttttagaaggggttttgcgagcgaatgcaagggaggctggtctggtgataggagcgagagagagagagaggggtcgtcgtcgtgaagggggtctacagcggtgcagaagaagggcaagatggaggtgggttgagtgtcgtcaaagcaggcggcgagagggaaagcgagcgggaagagggcaaggggacagggcaaggagagacgtagtgacgtccagtctaggcgtgagaatgggcggtgaggtcgggggggtcgaagctgcgttggttcagcgctgctgctgctgctccttgagggcatcgcgcgcggccttctgcgccgcctcctgagcgtcccttgccgacttgacaaagtcggtaaaccaccggcggaagttcttcgactcgagggtcgtcagctgggtgacaaagtcggccgccgtagccggcgggcacccgagcgaaggcaggtagccgttctggagacggtcgagtgcctcctggccgcgggcaaagacaatcgaccggaagagggtcgcaatttcggccatgacgagctggctctggccgtcctttggccggaacgcggcgttggacgggacctcaaagcagagcggcatgagccggtcgtagatgtagccctcgaagccgggaatgacctgcgtcgtcggcaggatcttggcctcaggtccgacgccgaggtagacggggccggcaagcgccacccgcggcacggccgggttgaacgcccacgcgacgacggtccgggcaaggatgctgaacgcgagcttctggcagatggggtcgccgtactcggtcgtgaagctggcgacgttggtcaggatgttctcgagctcgggcttattggtcggcgagagaaagacggcgtcgagccgggcgcccatgatcgacgcaaggaacgacaggtaggccgcccggaggttcgtgtgcgcgagctcgtcgtcggtgccttggaccggttcggccaagatctggaacaccttctggatgatcggcagcacgaggccgtcaaggacgtcgagcaggtcgccctggaaacgaagccgtacgagcgcagtcgatcagccacaaatgcgtgagcagccacggcgatccgcagcgacgtaccttgagcttgtgcaggacgaggccaaggaagccgaggaactcctggagctcgctcgactcgaagtgggcaacgatgcccttgacaaagagggcaacgtactcgagcacccgcgtgctcgcggtcgcgacgatgcgcgcaaacgcaaaacgggcggcctcgcgaatcgccttgagcgtgttgagccggtcaaggacggcaaggatggcctcggtcgactgcttgaagacggccacccacggcggcgagggcagcgcgagcgcgttgtcggtcggttccgggaagccctttgcgacattgccgatcgccatcatagcgtggtggatcgtgaggatcgggagaatgtcgtcaggtgacgatggcggccctcgctggaggttggccgcgatctcggccagtagcgggttgactgccgcctcgaggaaggaccgctgctgatccggcgcctcgcctagcgaccagatgaggatgccgaccgtctcaaagaggtaaagctgggcgtcaaagggcgacgtcattgtcgaggctttgagcagcaggtcctcttctggagactcgcgttccgggatgacgggcttgattgcgagcaggtcctggggggcgaagagcggcagggatcagcgcggccgccgtgcgaacgtaatcctgcggaagcggaggactcacgttcatcgagctgaggatctgggggacgaggcctgcgtcgagcgaaccgcgcaggtcgcggatgaacttgtgaaagaggtagaaggcgcgttcctggacggccggctgggggctgtggatgccacgctggtcgaggagagcgccgagcgtcgggctgatgaggtcgatccgcatcttgcagaactcggcgtagcgactcgcgcactcaaagaactgaagcgcgaccgacgggtgcggataggacgagatgtcggaacggacggtccggaggaggatctcgccctggaccgtcagctggaaggcggtgtagtcgacctggagcctgggcgtcggagtcgccgtgcccgagttcatgcccgagtcgctcccagaggcagcagccgccaccgtcgaggtcgagaacgaggccttgcggctgagcttgttcttgtcgagcgcggcctggacgtcggccggaatttggatgaaggctccgcggcccgataccttggtcgcggtgaactcgctccagctgtagacgaggaagagggcgagctcggcctgctgccagctgacggcggccgcgccgcccacctggaaggcctcgagcgtgccgtttatgacctgggagagcgtgccaacgaagagctccggatcaaagttggcgacggcctcgagcgcggtcttgagctgccggcggagcgtctggaagttggcgacatcttccgggtcggcatcgccgtcttcctcgcccagcgaccagtcggctcccggcgcccactccatcttcttgaggatcgtctgcagaagcgaggtgaagaaggcgcgcttctcggccgtgagagcgagcacctctcccttcttggccttcttgtgctgagattcggcaggagagcgtcagtcggtgatgcaccgagcagcacccagacatcatcagcgaacttacacgcttgaggatgtcgtcgaggaagccaaagacggccgagctcgtgtcggggtgctcatccccgagcaggcggaggaagagtgggaggcaagcctcgagcatctgctcggcctcctgcttcgtcgcctcctctgcgagcgcatccggcgcgatcatcttgccgagctcgatgccaaagttgttgagaagcttggccatccgctcgcgaaagacgtcaatggcctcgtcacggtcggcgagggcgacgcccgtctgagcggtcgcctgctcgagcggggcgagggctgagccgatcgagaggaacgacagaagctggagcttctcgcccggatccttcattcccttgaggacgatgcgcgagagcgcgtcgagcgcgagtagccggaaggggatgtgggcgtgttggagtagccggttaagcaggaagagcgcgtgcggcgtaaccgtgagcgtgatgtcgatccaggctgcaggaagaagcaggtgagatcaacaccctgcggacgagaagagccagaggagcgtaagtggtatcatacgcacggacgtagcccgagtaggccttgacggcgccctcgacaacctcggtccagccggcaccctcgccgccatcaagccgaccgagcgcctcctcccagacggcaacgaccgtcccatggagcgtcgccgcctccttctcgcgaacctcgtcccggagcttgttgtcgcgctcggaccggtcggccgtcgctggccgggccgatttcaagagcgtgtcgtggacctcttcgttgatttcgacgagcgtccgaaggaggaggagcgacgtctggctgttgcgcgtcggcttgaggagcgagagatacgggccgaggagcgaaggcgttgacgacggctgcatgggcgtctggagcgaggggtaaagggcgataaagaggagggcgagcgagtgcgcgagcttgttgcgcatgagagattgcactgcacgggtgcgacgagttggagtagagatattagctctcgtccgatagctcgagcggaggatgagcgttcgtcgatctggacgcatccacgtacctggcccagcctccgccgtcccctcgacatactccgtctcgacaaattgcaagaaggcctgctcgaccgcctgcttctgctcgaccggcaggccgtcgaccttgctcttgtcgccgagtagggcgtcgacgacctggagcgcaaacacgcgggcttctggcgggcacttggggttgccatccttgcctggctggttgggtcctggcgcaccggcaccggcgaggaagatcgacatggccagctggtggagcaagttgacaggtgagttggcgtcagcggcttggactcaacggagcagtctggttgccacggtggactagtcggggagcatgaagggagtacggatggaggtcgaaactccgagtagcaggtcgcctgactgatcctacccagctggtcagaggccagcagggctcaattaccccaagatacgaaggtctcccagtcgccgccgacgactcagggctctgacgcccagcctggaggccgaagacgcaagatcctgctcgctcgagctcaacgccgacaaccctcggccgagataggtcagaggtcaaaggtgaagctgctgccagcgccgtcggcaccaaagggcagcgccgctagggcactctaagcccgtgcgatccaacatccgggcgagcagagatacgagagcgcaagatcgagacgagaaagcaagaagggacgcaccgtccaataccggtctggctgagcggcgacgtcgcggaggaagtcgtttgcctgttggcgaagcaacggatccgggctcgaggcaatttcgaccgcatagagcagctgcttttcgtccatcgtgtcgaaggtgctctctcttgttggattgctaaggccgcgaagagggaggagagggagtgttgatggttcgaagggagcatgcacgacgaaggcttcgactctgcatcctgcgcgccgcctgtgaagctgctcgcgcccggcccgccaaacacctgccggacgctgctgaaaagttcgtccgagggcaagtcttcgctctcaagaggtctgcagtgctcaggaaggaagagacgtagagacattggtatataaatataggagaaggatgtcgcctccaccggtccgagcccgccttcgatggacgaaggggcgagccgctctcgcgagctacagagacgacggaggacggcctgcccgaagccttcgtaaaggtcgaggtcaggccaaggattgcttttggaaaacaaagttttgaccgctcgagtccacgtcgcgtcgaccctcgaggggtgtcgcgggatctgagcggcttcgaaccgtccgtgtgaagagaaaggaggagcaggaggagaggagttggcagatggcgtccgggcagcgtgcttggcgtgcgaggtgcggttcaaagagcggagagcgtcagcagaggggagagcaggagatcccgccgatcagtccttcgtgtcgaggtcgttgtccgagcggcgacagaggaaggagggtcgtcgttggtcggcaggacgaggtgagcgaaggtcgctcaaagtccgtcgcgccgctaaggaaattaaaaaagggatcagccggttccaaggggctcgcctcgccgtcctgttgccctgttcgacgaccctacatcgctaccacagccaagatctcgtagagaaatgggtcagtcgctccagtcagggatgcagagtgctctcgttcaagcgcatcgagcggacagtgaactgatcgctgtcgtctgctcccggcttgccaatcggccaacctgcagccttcagcttcggcgcacctcgttcgtcctcgttattccgctgcagctcgccgaccagctcgcacgagttcagctggcacgccggctgtcggagagccagtagtatgttcgtgcccaagccaagaggctgaccctgtcgtcgcgctctcgtgccgcgctcctgccctcagctcccgcctcgggctcctctcctgcccagccggcaacctcgctcttcggcgctcccgccgccggctcgacctgtgcgtttgtcctcgcatcacgaaggggcgctcgggatgagagagcgatgaagccgctggcccggcctgctcgggcgtaaagcctgtcgggtcggagcgtctcgctgagggcagagcgtcgataagaggctgataattgacgagcctgaccgtattcggtgagcgacgttcaactgacctcgaacctgcccttcccccaaccatagcgactccggccaagtcgcctttctctttcggcggcggagccgcagcgacgacgacgcccgccgcgccgccgccggccaacctctttggcggcggcggcggtggcggtggattgttcggcggcggcgctggtgctgcaaagccggcggtgccttcgttcggcggctttggaggcggtgctgctggtgctggcgctggcggaggactgtttggaggaggcgcgccggcggctccggcagccagtggcggaggaggagggctgttcggagcgccggtaccggctgctccctcgaccggcggtctctttgggtacgtctttcttttgcaacctggctgaggacaacacactggcggtctctgcgagcggtccgtggcgcctcagaatgccgaacgcagaggctgacccgctcgtcatgccgtgcgtttcagcgctgcgccggcagcatcgaccggctcgacgccagcaccagccgccacctccctcttcggcggcgccggtggagccgctccggctgctggagggtcgtcgctctttggcggcggcggagcgagcaagcctccggcggcgccggcgacgtcgctctttggcgcttctccagcggcacctgctgcagcgtacgtccacaaggcttccttttgccgcatcctccaagtccgcatctgacaccaagcttacccttctgctcccgaaaccagcccgtccgctccggcaagcctctttggcgccgccccggcaaagccagccgccccggccgctgccgcccctatctctctcttcggtgcgcccgccgcacccgcagcagctgctccgaagcctgcggcgccgtccctctttggcgctcctgcctcagcggcgccggctagcagctcagggacgagcacgcccggtggtggtggcggcgggctctttggcgcgcccgctccgaagccggccgagcagccgccggcgtcgcctgctgcaggcgggctcttcggcgcaaagtcggcggctgcgcctgctcctgcagctggaggcggactctttgcggccaagcctgctgagtacgtggtgccctttcccctcgtccgccccggccggtcgatctgcgcgaacgcgaacgaacgtgtcttgggggactgtctttgggcaagctgcaaagttgctgactgagttgtttcgctctgcctctcagatcgtcgaccccggctccggctccgagcggaggtctctttggcgcgaagcctgcgacgcccgctcccgcgcctgctgcgggcggaggcctcttcggcgccaagccggcagagtgagtgcttcgcgattcgtcaagggttgcctgactgaagctgacgatcggccgccgactccctcccaggcctgcccctgctgctggtgcctcgagtcttttcggcgcaaagcccgcctcggcgccttcgacgacggtggctccctcagcgccgaccgacagcgtcgccggcaagtctggcggcttcgctgccttgcccgccccagccgctgccggcagctcaagcacgccaacgccgccagcggccgtgccgtcggttcccgccgagccggtgccgagcctgctccgcggcaagacgatggacgacattgtcaactcgtggagccgcgagctcgacacccaggtcggcgagttcaagcgccaggcgggcgaggtccgcgagtgggaccgtgtcttgatcgagaacggcaagcaggtgcgtctctcgacatagagcatcttctacgtgcagcaactgacgctctcgtctcgcctccaccgtgcgttcgacagatctcgaagctctacgcgcagacggtcgcggccgagcagaacaacaaggcgattgaggactcgctcacctacatcgagacgcagcaggccgagctcgccaagctgctcgacggttacgagggccaggccaacgagatgtacgagagcacggtcggcgccgccaagggcagcagcagcgccgcgctcgccctgacgggcggcggcggcggtggcagcctcgactatgggcccgccgaccaggagcgcgagcggtcgtacgcgctcgccgaaaacttgcacggccagctcgactcgctcgcgagctcgctcgcctcgatgatcggcaccgtcaactcgcttactgccgcgaacggcggcagcaactcgaccgtctcggccgccgccgtcgagggcgagggcaagccggcggccgctccggtcgaggaagaccctatcagccagatctcgcagatcctcgacgcacacctcaagagcctccagtggatcgacggcgcgagcgacggcctccgcgcgcgcgtcggtgaggtcgagcgcaggctgatcgacgtcagcggcggcggtgcggccggaggagccggcgctggcggcggcttctcgggcggcgcatcgaggctgggagcttcgcagtcaggcggagtcggcggcggtggccgctttggcctcagccggcggggctgaggcgcgtcgactgcgccttcacccgcgctgtcggtttcccggtctgtcatgactcttttctccacgcccaggtctcatcaggatcatcagggtcacgccttgagcgcgcgctcgggcttccagtcgccgtgctcgatccaccgctcgaggttctcaaccgtctcgtgccaccagatgtcaatctgctcggtctcgacgtaggccatgtgaggcgtcaggctgttgggcacgagagtgaggggaggagagtcagtgaggacgacgaccatcgggcgaagaaaaggccacgcacgttacgttgttcaggccctcgaaagggttgccgctcgtcagcggctcctcctcatagacgtcgagggccgcgccgccaatcttgttctcccggagagcatcaacgagggcatccgtgtcgataagcgcgccccgactcgtgttaacaatgatcgcgccaggtcgcatcttgtcgagctcggccgcgccgatgatgtgtcgtgtcgacggcgagctgacgagatggagtgagacgacatcggaccgcttgagcaggtcgtcgagcgatgacgcgagctcaacgccctcggcaagcgggccggagctggcgatccgctcggccgtcaggttgggcgaccaggcaatgaccgacttgaatgagagcgcccgagcgacgggcaggagtgcctggccgagccggccaaagccgacgaggccgagcgtcgccttgcccccgatcgcagggtttgtcgccgtctgccagggcttgtccttctcgcgcccagcaccggccatgacggccgtgtggtcccgggcgagacccttgagcgcaccgaggatgagcgcccaggtgtgctcggtcgtcccgctcgcgacgccgacgcctcccggcgcggtgacgacggggatcttgcgctcggtgaaggcggtgaggtcaaggcctcggtttcgaaccgccgtcgtcgtcacgaagcggagatttggcagacggtcaatcaggctcttggtgaagggtgtccgctcgcgcatcgtgcagatgatgtcgactgtgacggcgggcgcaagggcgagcagcagtgtatcagtcgaaggggctcggtcgtgcgcagacgatggccggacagacatggctcgagccgctcgacgagagcgtcctcattgtgcagcgtgtcctggaagatctcgaccgtgccgccgagcgcctggaccttggaccagtccgctcgcttcgaggcgagcctgtcagccgagcgcaaggggaagcctcgtcagtgcgtcccggagaaagccgaggcctcagctcggaggaagctgtgacgcactggtagtcatcgaggcaggcaatcttgaagagacgtttagcggccgacatcctgtgctggttgcggctctgtcgagtcgttcgagtcagtgggtcgagggtgagggacgcggctgacgagatgccggctcatcgagacggagacggcgagccgacggcgctgcggcccaagcttaaagggtccgatgacccctagtctggattttagatgggcttcttcccaacccgcccgggcgaaccgactgccgtacattgcagcgtgatgccgttggtcgacgaccctcggaacttcgacttcgtcccttcactctcgcgctctcgcccaacctatgctccgcagccaggcctcccggtcatgtcgcctgcttgcatgcggcagtgccagcgggcctcagccggctcagctacagccttcgtcctcgcgcgggctggcctcgtcgtcgtcgtcgtcaagctccgaccctccggcgccgtcgagctctcgccggtcaatctcggccgtcgccgtccagcagcagcgagtcgagcagcaggcccctctcgcgtacaatgacgaaatttgcagcggcggctatgccagtcgtcggctcagctggccgtctgctgctgctcctgctgcagctgctgcagctggaacgagcggcgacgagcggcttgagagcgcgcgccgcaggacgttcaagccgcgagagggcaaggaacgcgccgacaccgagctcaacgaccgggcggccgctctcaagcgcctcgacaggatgttccccccgagaaagaagccgaccgcggaacgcgtgttgccggcctcaacggcaggcgacgaacaaccgacgccgacgccaaacgctcggcgtcggctccgccagggccagcttccctccgtcggccgcaagctcgcagcagcggctgcagcgagccccaagccacccgagccggcagggccggccgagaggaagcataacctgctgccgcaacagtcacaggcgatggtgaacgctattcttctcccacctccgccgctcgttgcatcctcggaccgtccagccgcccggcgaacaacacctccgcctcccgttcagggcgacgtctccttggtcccaacttttgacggtcgagaggaggctcaactgaggccgactcccgaccatccaaccgcccaaacctcggcctttgcgatccacgtcgagcacagcggcctgaatggccggccgcttgtgctcttcgtctcgcccgcggtccagacgctcctcgccgagcgatatccatcttgcgacacgtcggaccaaatcctagactcaaagattccgctcgagtcgaatcgtggcgctgcggtcgtcgcccaggccgccgggaacgaccgggtccaccttctcgttcaagcgcttgggtccggcttgcatccctacctgccgacagaagcggaagtcggcctgatatctccgtcgactccagccgctgccgccgttgatggggcgctcgcccgcgagtgtgccgccctcctctggaaatgtctcgaggagaaagccaagacgcacgaggattggttctggatcgcccgggccgagctcgagctgcacgagaccatctgtcagtcgccccgtcaatttcaggtatgccgtctggaagctgatatcgactacgctctcgcctcgcccgcctcgctagccgcaagtcagctcttctcacgcatgcaacgcacgcgctcgagtgccgagctcgagcactcgctgccgagcctctacggcctagttcgctcagccgatcccgacggcggccttcaagcggcggacgctttcgtacgagctgcacgtcactttaagcctgcagcaaccaccgaaggccgcagacagtttgaggccatcttcgaagcgatcctcgaccgactcgccgctgacggagaggttggggccgagggcttccagcgactgatctgggtcctcgagtcacgggctagcttcgcaccttccggtgagcagctcacggccgaaaatcgacgctcgctcaaccggatggtggtccggctccttcacgcgagccaagcagccgccccggaactcatgctcgacgtctgcgttcgactcaccgataacgccgtgcttgcgccgcgatcgggcacgattgcccgactcagcctctcgctcgccaatatcgagagcatggtcgagctccttcgcatgaaaggcttgcgcgagcgacacgtcgctctcctcctcgacaggctgctctgccgactcgaaaccctgcccgctgaagcggatgccgacgacgagctcaagactacgatcgccaattcgctctcagcagcggtagcttccggtcggctgccggcgctcgggccgggttccctcgccctccggttcgtccgctttctcgccgaaaacggccaagtggtcgccgcagccgaatccctccttccatttgcgcaggacgggcgtgagctcgaaccggcctctgtcgccgtcgcggtcgacgtcctctttcggctcgctaaggactggacggccggcgccgtcacgctctgccatcgaatcctcgaggccatcccagtgggtcggcgaccagtcggcctcttcaacgcgctcctccggcaggccaatttgtcgttccctttacggaaagacgccgacgctgtcacggatcagatcgaggctcttctcgctgccgagccaggcctcgtgcccgatctagggacgatcgaggcccggctgctcgccccgccacggtccgaacggttgccgctcgtcgagtacaccatggccgagctcgttacgcactcggacgcccgggcgcagacttacgccgagctctgggagctgacgctcgcccagggcttctcgttccggccgacgacgtggcgactgctgctgtcggccgtcgggcgcgaggccggctactttcgcgcgcgcgaggtcatcgattggatgcgcatgcacggggtcacgcccgacatgaccatctggaaccaggtgctcgccaacgcccgtcgggcacaaggtcggtcgggccaggcgaagatcaaggttttccggacgagcctccgccagctcgtccgggaggagcagtccttccagccagacatgtgtgttctgccctcggctgtgccatcccagacttgctcgttgacattctggctccgtcactcatcagcgacacctttctcgagattgtccgcgtgctggtcccccgcgactcgcgccactttgccgccggtcccctgcgcgagctttgcgactcttacgcccggcaggccgacctgcccttctacccggccggcgggcttgcgggcctcgccgagcccgcgccgacgcccgcgccagggtccgtctacgaggcgctcgcaggcgacccgtcggtcgccctcccaaagcttgccttccgcttcccgaccgatcctgccgagcgcgactttgacaagcacgtcctcgccgcgtacgacctcttccggcgcggattccagtatcgggccgacggcgctgcgatcgaggcgctcaacaaggcccagaaggccgctctgcgtgctcgccagcgagatcttctggcgagcggatccacttcaaagggtcgtcggggccgaagatttcaggccacataggatgcgccttcatttcgattggacgaggatcagagggcgtcatgctgcaaagccaggatttccagcgcaaacgttggcaaacttgtcaaaaggtttcaggctcgcatcagtcagcctcgaagctttgggttcgggcaaaatgggaggtgtaccccaggcggcagcgagatccgcgcgcgcgaggggcactggggtcacttcctcatacactgcctcctgccgaagagcgacgtggaccccagcgaagcagcagcccaacccgagagaccgaatgacgacgctctcctgcagcgtggtgtcgtcggccgtcgcttgtgagcgacgcgattgtcggcccagcgcttcggccagtctggtcgacgatactgccactcttcaacgggcggcaacggctctcggctagctacttaatcgaggcactctggctgggtcgcattcatcgcactcagaattgagacaggggtcatgcagcacttgcatactaacttgaggagaagggcgcgctcggcattcgctgcaatggggagggagttccggctgtcacgccgcctttcgttattctgccaacggtctcagtcgctttcgagacgaggccttggatgctcgagcgccgcgacggatgttgcatcgccctgttcgacgaaggcggcgtggctttgcttgagggacgggttgctgctgcgaggcgccgttcgggaggaaacgtggggtcccgcacgcccttcggattcgcgaaagagacgctggggcggccggccaagtctgctgccatcttccgacccctgcagcacccaacccaccacccatacccccaacccctctttcctggatagctcgacgactcctccttgtcagctaccagccacctcccctccctctcttcatctgtctctcggttcctgggttttcgagcgactagagcttccctttccttcgcgcgccggctctcgctcccccatcccgcgtctctccgaaggccgagcgagcccttccaaccatcatgtctgcaatcgtgcgtcgctcctcggctctttcgaggcgtagacgctcgcgctatgagagtctggtccgagctgacgctctgctcttctctcttgaatcgctcgctcggttggtgcgcaggccaacttcttcacctcgtcggcgagcgagcccacccggccgttgacgatccagctcggcccgacacgcgtctcgatcccggtcgcgaccaaggagaccgaggcctgggtcgctgccgaggtcctccgcgaggagttcctgctcgagcaggagggcaaggtccgtttccctctttctccttccggcctgcctctcccagccgcgcccacccattttagccccgggcgcgcgcgcgcgagcttgcccgtcggctcccgccggcggcgcgacccagcgtttttaccccgcgcccctttgtcgtccgtcggctgagccgaacgagcccgacagacgacgcgcctctgctgacacctgactcgtgccatcccgcaggacgttgctgaggcccagccgacgcacgacgacgacgggaacgccatgcccgtctcgaaccagcccaagattgagctgctggcggccttcatctcgttcatctcgaccaagctcgcgtcaaccgcgtcgtcctcgtcggccgccgtcacctcggaggatgccgcctacgacgtcctgctcgcttcgttcgcccactttaccgccgccttcctgacgacgccggcggtcgacgtccactcgctcgtccaggcgtacgacccggacgcccgcaaggcgatcctgacggcctacttccagacgctcagcctgctcgagggtcgtttcggcaagagcggcaaggtgcccaagcagcccaagagctggctcatgagctcagccgagaagtccgaggccgagatctacgccctctttggcggccagggcacgaacgaggtccgtgccgctcttcagcccgcgctctgaccgccccgtcctgaccaccgcctctttgcccttcgtcgtctgctaggtctactttgacgagctccagagcctgttcgacgtctacaacccttacgtcgccggcttcctcgccgaggcgaccaccaaggttctccttccgctcgcggccaaggcgaccgagcagggccactcgttctacgcctctggctttgacgccttcggctggctgagcggcgcgagcccgcggccgtcggtcccgtacctggcctcgatcccgctctcgctgccgctcatcggcctgacgcagctcatccagtacctcgtcacctgcaacgtcgtcgacaagacgccgggcgagttccgcgcgcttgtcaagggcgcgaccggccactcgcagggcgtcgtctcggccgtctgcatcgcctcgtccgagtcgttcgatgacttcaccgccaacgccctcaaggcgctcgagctcctcttctacattggtctccgcggccaggaggcgttcccgatcatgtcgatcgagccctcgatcgtcgaggacgccgtcgagaacggcgagggcgcgccgatgccgatgctcgccgtcggcggcctcacgctcaagtcgctcgagggccacatctccaagacgaacgctcacctgccggagaactcgaagctcgaagtctcgctccataacggtccgcgcaactttgtcgtcaccggcccgcctcgggcgctctacggcctcgcgaccggcctccgcaaggttaaggcccccgccggcctcgaccagagcaagattcccttctcgaagcgcaaggccgtcttttcgacccgcttccttgtcgtcggcgtcccgtaccactcgcactacctcgctggcgcgacccagaagctcgtagagcaggacctcgccggccgcgagctctttacgccggccggcctcgcgatccccgtcttcaacaccgaggacggctcggacctccgctcgctcggctcgtcgctcacggcctcgctctgcgaccaaatcttcacctcgcctatccactggaccaaggcgaccgccttccccgacagcgcgacgcacgccattgactttggacccggcggcgcgagcggcatcggcccgctcaccggccgcaacctcgagggcaagggcgtcaaggtgatcgtccctggcgacaagggccgcgtcggcgccgagatttactcgagcatcgccggcaagaaggaggtcaagtgggtcgagaagtacggccccaagctcgtcaagaccaagtacgtcgccctcccgcctcgtttttctctctttctcgaggactgctgattgacccccgccttgcgctctcagggacggcaagatccacatcgacacgccgttctcgcgcctgctcggcaaggcgccgatcatggtcgccggcatgacgccctgcaccgtcggcgccggctttgtctcgtcggtcctcaacgccggctaccacattgagctcgccggtggcggccactacaacgcggccgcgctccgggccaaggtggccgacatccagtcgcgcgtcacgcccggcattggcatcaccctcaacgcgctctacatcaaccagcgccagttttcgttccagtacccgctctggcaggagatgcgcaaggagggcctcccgatcgagggcttctgcgtcgccgccggcgtcccgtcgtccgagaaggctgtcgagatcatcaccaacctcaaggcggccggcatcaagcacatctcgttcaagcccggatcggttgagggcatccgccaggtcgtcaacattgccgccgccaacccggacttcccgatcatcctccagtggacgggcggccgcgccggtggccaccactcgtgcgaggacgtccatcagccgatcctcgccacctacggctcgattcgcgcccaccccaacatctcgctcgtcgccggctctggcttcggtggctcggacgacgtctggccctagtgcgtcctgccctctgcctgctcaccgccttgcgactgtgcgctgacttcctctccttttctcacagcctcaccggagactggtcggtcaagcagtttgaggcccagccgatgccgttcgacggtgtcctgtacgcctcgcgcgtcatggtcgccaaggagtcgcacacctcgctcgccgtcaagaagctcatcgtcgccgcccccggtgtcgacgacgagaagtgggagggcacgtacgacaaggagacgggcggcatcctcactgtccggtccgagctcggcgagccgatccacaagattgcaacccggggcgtcaagctctggcgcgagtttgacgacaccgtctttgccctcgccaaggacaagcgggccgcctggctcgagggtaagaaggactacgtcattgagcgcctcaacaaggacttcaacaagccctggttcggcgccaaggccgacggcaccgtcgtctcgaacctcggcgagatgacgtacgaggaggtcacgaaccggatggtccggctgatgtacgtcgccaagcagtctcgctgggtcgacaagtcgctccgcaacctcaccggcgactggctccggcgcgtcgaggagcgctttgccggcatcaccggctcggccgacaagcactcgatcctccagtcgttcgactcgctcaacgacccgcacgcgtttgtcaagacgttcttcgccgcctacccggacgcgaccgagcagctcctcgcggccgaggacaaggccttcttcctcaacatctgccagaggcccggccagaagcccgtgcctttcattcccgtcctcgacgcctcgttcgaggtctggttcaagaaggactcgctctgggctgccgaggacatcgacgccgtctttgacgccgacccgcagcgggtctgcatcctcatgggtcccgtcgccgtcaagcactgcacaaaggtcgacgagccgatcaaggagatgctcggcggcatcgagtcgcgcctcgcccagaagctcctcgaccgctactatggcggcgacgagagctcggtcccgaccgtcgactacatcggcgccaagccggttctccagaccggcccgctggccggcgttgccgtctcgaccgagggcgacaagacgacctacggctttggcaagactgccgccagcctcccttcggccgacgcctgggtcgagtcgctcgccggcccgcaggtcaactggctccgcgccgttctcgcctcggtcaactttatccagggccagtcgtacatttcgaacccgatgaagcgcctgtttgccccccggccgaaccagcgggtcgaggttgtcgtcggcaccgacggcatcccgacctcggtcaccctctttggcggcgcccgctcgtttggccctcatccggccgacttcaaggcgctcgagctctcgtttgcggcctcgaccaacacgatcgagctcacgatctttgaggagcgcagcggctcgtcgatcccgctcaactttaccttcaagtaccggcccgacatgggctttgcgccgatccacgaggtcgtcgacggccgcaaccagaagatcaagcagttctactggaagctctggttcggtgacgacgaggtcatgccgaacctcggcctgaccgagaccttcaccggccccgagaccgtcatcaagaaggaggacatcgagcgcttctgctcgatcgtcggcaaccagggcgaggccttcaagacggtccgcggcaacgacatccaggccccgatggactttgcgatcgtcgccggctggcaggtgcgtctcgcgcgtccactcggtgcgccttctgctcttgctgacccgctctcttctttgtccattgcaggccatcatgaaggccatcttcccggccagcatcgacggcgacctgctcaagctcgtccatctctcgaacggcttcaagatgtgccccggcgcgacgcctctcaaggccggcgatgtctgcacgtcgtccgcccgggtcgtctcggtcgtcaacagcgacagtggcaagacggtcaaggtcctcggccacgtcctccgcgacggcaagcccgtcatcgaggttgtctcggccttcctctaccgcggccgctttaccgactacgagaacacattcgagtcggtcaccgaccaggagtttgccgtcccgctcctgaccgagaccgacattggcgtcctcatgagcaaggactggttccagtgggacaacgaggcgaccccgctaaccgccggcacgacactcgtcttcaagacgcagtcggagctccagtacaagtccaagacggccttctcgtcggtcgtcgtcaagggcgcggcctttgtcaagaaccagatcaaggacctgatcaaggttgcgacggttgactgctcggtcgccgacgcccagggcaacccggtcgtcgagttcctcaagcgccgcggctcgccccagggcctgcccgtcccgctcgacagcgcctactcgctcgtcaccgccggctcgcctatctcgctcatcacgccggcgaccaacgagccctattcgaagatctcgggcgacttcaatccaatccacatcaacccgtactttgccgactttgcgctcctcccgggcaccatcacgcacggcctctggtcgagcgcggccacgcgcaaccacgtcgagacggtcgtcgccgacaaccacccggagcgggtcgtcgcgtgagtcgctcgccctgcatcctgctccccacctcctgcccactgccgctgactctgctcctcgccctcccgctttacagctacaacgtgaattttgtcggcatggtcctccctggtgatgagctctcggtcaagctctcgcacacggcgatgaacaacggcaacaaggttgtcaaggtcgagaccttcaaccagcggggcgagaaggtcattgacggctcggccgaggtcaagcaggcgcctacgacctacgtcttcaccggccagggctcgcaggaggtcggcatgggcatggagctctacagcacctcggcggccgccaaggccgtctgggactcggccgactcgcacctgctcaagacctacggcttctcgatcatcgacattgtcaagaacaaccctaaggagctcaccgtctactttggcggcctccgcggtcaggcgatccgcgcgcgctacatgtcgatggagtcggaggacgagaagggcaaccgtgtcccgctcttcccagaggtcggcccgctctcgccggcttacaccttcacctcgccgaccggcctcctcaacgcgactcagttcacgcagatcgcgctcgtcaccgtcgccaaggccgcgtttgtcgatctcagcagcaagggcctcgtccagccccggtcgccgttcggtggccactcgctcggcgagtacgccgcgctggcctcgatcgccgacgtcatgccgatctcgtcgctcatcgacgttgtcttctaccgcggcctgacgatgaaccgggccgtcgtccgcgacgccaagggccggtcgaacttcagcatgtgcgccatcaacccctcgcggctgccgtggtagactctgccctcctgtctctttgcaacccctcatcatcatcctcctcctagacccggcacactctgccgcgccgctgccgcttcgctctgtttgacgaccccttgacgccgttcctgcttttccacccatcttctccctgtcgctctgtcgagcgaccggggagacccatctctttctgggccctactcctcctccttctccccttgctcctctccatagaacacctcttttgcacatctcgctcattcacaaaaagatgctctctttctctctctcgagcggctgctttgtgggtcgcgtccctcgtcttccgcaccagattcagggtctgaacccgctcgcaggcatgtgcaccgtcgtcctgcatcgcgaggcttccacgccgcccaagccgccactgcgccgcgagatgaacaggtcgcctcacacctgcaccctcccccacacacaacctacccagacaccccacctaacagtctgccagcatggtcagtcagaccggcgcttctttccgagacccggccggaagcgcacgcgctgattcgacttgccgacctgcagggaaactcgctcggcggcatggcgcccgacggcgccgacgacaagaagaaggccgatgagaaggtgcgtcgctcatgagcgcagcgtcatcgaaggagcggctggagggctgcgaacgagggccaaccaggccgtggctgtagacaggtcgtttccagaggtcgcagccgtggccgcctgctcgacgaggctgagggccggctgcttcgagctcagctgccgcatactgaccttgctcctccttcgccgctcaaagaagaaggagcagaagaagtgggagccaccgctgccgacgcgggtcggcaagaagaagaagcgcgggcccgatgctcgcgttcgcctgccgcccgtctacccgacgacgcgctgccggctcaagctgctgaagcaggagcggatcaaggactacctgctgctcgaggagggtacgtgccggctgcttcgctggctgagcttttgaagtttcccttctgacgccgctcgtgccgtttgacagagtttgttacgaaccaggcgctgctccggccagacactgactcaaagacgaccgacgagcgcacggcggtcgacgagctccgaggctcgcccatggcgatcggtacgctcgaggagatcatcgacgacgaccatgcgattgtctcttcgacgactggccccgagcactacgtctcgatcatgtcgtttgtcgataaggacatgctcgagcccggctgctctgtactgctccacaacaagagctcggccatcgtcggtgtgctcggggacgacgtcgacccgatggtcagcgtcatgaagctcgacaaggcgccgcaggagagctacgccgatatcggaggcctcgagaagcaaattcaggagatcaaggtctggccgggatgctcctactcaggcttcgagcgactagagttgctgacgtcaaacccttgctgcccctcactctccgccctctgcaggagtcggtcgagctgccgctgacgcacccggagctgtacgaggagatgggcatccggccgccgaagggtgtcatcctgtacggtgtgcccggaacgggcaagacgctgctcgccaaggcggtcgcaaaccagacgtcggcgaccttcctccggatcgttggctccgagctcatccagaagtacctcggcgacggccccaagctcgtccgcgagctcttccgggtcgccgaggagaatgcgccgagtatcatcttcatcgacgagattgacgcagtcggcacgaagcggtgcgtctcttggctttttttactcgcacaaagccatcgcctgactgacctcgtccgatgctgcaggtacgactcgacctcgggcggcgagcgtgagatccagcggactatgctcgagctcctgaaccagctcgacggcttcgacacgcgcggtgacgtcaaggtcatcatggctaccaaccggatcgagtcgcttgacccggcgctcatccggccgggccgtatcgaccggaagatcgagttcccgctgccagacgtcaaggtccgtcgccctttgctccagcttgtcgtgcccggcgaatcagctgacggcttctctcactccactgcccctcttgcagacgaagcggcacattttccgcctgcacacgtcgcgcatgacgctcggcgacgacgtcgacctcgaggaatacatcctcgccaaggacgatctttcgggcgccgacatcaaggccgtctgcaccgaggctggtctgctcgcgctgagagagcggcggatgcgcgtcaccaaggcggtacgtcgctcgcagcacggcgtgcttctcggcaagaagctctttttcgctgactatcactcttctcgccgcctgccaggacttcggtaccgcccgggaccgtgtactcgaccgcaagcaggagaacacggtgcgtcctcggcgtggctcttgctattgttctcgcgacctctactgacctttgatcaatctatcagcccgagggtctctacctctgatcgtggacattgctatcgagatgccgatgcgcgacctgtgcgagccagaattaggcctctcgcaccaccgcgaggtttagtttgagtaggccagcgcgagcgcgctcgcaagggaagatttgatggtgaaggaggcgtcgacatcacgctgtcgatcgactgaacgagccaccgttacaagctctgcgctggtcctaacccttgtctctatggcctcctcgcctcgccttgcttctcatgagttggctcggaaggacttgacgaataactcatgtctcgacagctgcgtctcgaggtcggcggtctgctgcgcttccgcccccggctatatagctcttgccgtgccgtcggccgagctttgaggctccgtcgtccatcatcgtcgacactcctccatccacttcgtacattagtcgcacggcctctcgaccaggttcagcgcacacgagaatgtcgcctccatcgcgccctaccgaactctcgccttgggcgtacgtcctgccgcctcccttccgcgccaactcgaccttcgctccatcgagcgggagctgacgaccgctggccgctcgctatctcccctgctctgatcttgaccgcctgacagctcggccctcgccggcgcactcgctgccgtcctcgccaatgctgccatctacccgctcgacacggtcaagacgcgcctccaggcggccgacgccgacgaggcgagcgaccagcagctgccgctcgagctcggagctccggcgtcatcgactagcgacggtaccaccggcaagaaggccagccagctctcggtcgagaagcagtcttccgagggcaagctcgcagctggtcacagcaagcgtcggccggctgccggtctgatcggctcgctcggtcggatcctcgccgaggagggcgtcggcggcttctaccggggcttcctcgccaacatgctgaacactttctcgatgcgtgcgtcctgagtgtgcctgctacgccctacgtcgcttgtcctccagcgatggtcgctagcaatgtccggagttcggtcgaacgcgggctgaccgcctcacccccgcccgcctgcgcgatctcgtcaccccgcagagtacgcctacttcttcttctactcgctcgtccgctcactctacctcgcccgccagcgccggcggcttcagcgtgccggcggtggggctgcgatcgggacggcagctgagcttgcgctcggggcgctcgctggagccctcgctcaggtcttcacgatcccggtcgctgtcgtacgtcctctttgctccgcctcgccgctggcagacacaaagctgagcgtttattcatctcgcttccctttcctcgcttgcagatcgcgacccgccagcagctcgcccggccgtcggacggcccggcgcgctcgctcgtcgaggttgcgcgcgagatcgttgccgaggacggtccttcgggcctttggcgcggccttcgccccggcctcgtgctcactgtcaacccggcgctcacctacggcctgagctcgaggtgcattgctgctggtcctcattgcgtgaagggcgctccgtccgctgacagtgttcgccaccctctcgcacaggctgaaggaggttctcctcgcccgtcggcagcagggcaccctgccgcccaagctgactgcgctcgagtcgtttgcgctcggcgccttctgcaaatcgatcgcgacggtcgttacctacccttacatcatggccaaggtccgactccaggcgcggcgcttcccgctggtggcctccgcggctgcagacgagaatgagaccaggtcgacgcttgcgccgagaccgggagaggctgcggccgctgacgatcagacgtcgtacgccgctgtcgcgggccgggccgtcgagaaggtcaccggccgctcggtcgcggtcggtggcggccgcgctcctgctgccgacggtgcggccgacgtccttcgccgggtgtatgcgaccaaggtgcatcgcgattcggtcactaatgtctgaaaaggcgtagcaatcgactaaactcttgtctctttccctcgcctcttctcctgctcgttctcctcagggcttctccggcctctaccagggcatgggcgcccagatcttcaaggctgtcctcacccaaggcgcgtctcgccagccactgtcacttgtcctcacagccttcctcagctaacagcagctcctctttgcccacgtcgagcaacaggcatcctcttcagcgtcaaggaccaggtcgagtcttacgccctcatcctgcttctgctcctcagccggtcccggaaggcggcggcagcggcggcggctacagccgagaacgtcgtcgagcccctcgtcgacagcggcaagcggctcgcgcatgcaggcgagcagatcgctcagcacgtgccggcactcccctcgtccccctcggcggctgtcgaggctgctgtcgaggcagccaagggcgcggctcactcgatgaagggcgcggtcgaccatgtcgagggccacctgccaaatgcagtcgagggccttcgcctggccgagacggcggctctgagtatcggtcgggatgttgtccagaaactcgcagtcgacgccgtcgcaggcgcgatccaaaagtgaaggggacgaagctgtcgtcgcttgacttcaccgatcacctctctcgcaccctgccgttactcattccgtccatctgccctctcttcccgttcctcgacgacctcatcgatgtagcctttcttcaccctccctgaccggaggccgccgacgaaagcggacggcacattctgccggacggttgggagtgatgcctgaacagcgacgagctagactatcaatgctgaccgggcaagcagcagcgaacgcgcgctcatagcttgcggtactgccagctgcagcaagttctgccagtgaagtcatcgattcggcgggtaacctctcgactccgagtgtcgcctggagcgaggttgcgggatgccggtcgtctagggtcaatcgacgcgagccggtcgggttgacgtctgcctgtcgggtaagtggtctttaggggacgacgtgctggtttccccggggcgggggcgttgattaccccctctggcggatgagcgcggcgtgtcggccagggcttgcagcggccgcggatgccctttgagagatccaaagcgaagggaatcgagctaaacagggccgcatcttctacggccttctgcccagccgcaagctcgagcagctcgaatgctttgatggccttggcctagctttccatgcgctcaagggcgacgagaccgacgagccgccgtttcagctcgagcgcatgactgatgatctgcggcacggcgctgtgcggcgccggcggcgagcggacctcgacgacgtagtgggtcgactgtgcctgctcagagaaattgaggagcggacgagcggtcagcttttggccttagaccgagggagcatgtgtcgcgttcggatagacagacctttgatgagggtgacccgactgtaaagacctcgacacggaggccgacgctaaagtcgaaaacgacgccccgcttcgtgaagcttgaggtcctggtcgcgaggtgcagaagaggaggagcgggtcagcgtcaacgattactcgacgtcgtctgttcttgacaggcctcggcctcgatcgcacctctggtagcccatggcttgtacgacctctccgcctgagccacctgcgacgactgaagtgtacaggacgggcgtgacgagcgcttggggctgcgcgcgagccgactctggcctttgcagagcaaccttgaaggccaaggcgggcaagcggatcagctttgaatgtgtgatgaacaggccaggcagtgggcgttgcttcaacgtacaatgaacctgaaatgtcgagcggccaggccgggccaaggaggccagggacgagatcgtcagccggtcgctcactcaggcggccatgtcgacgaggccagaccactcacgtcctcggcttatcctcgccctcggtcagcttgcggacccgcagccaggcgccctcgccttggctgccatcctcagcccgaggagcccagccggccggcttgaagacggtctcgtcgagctcaaacgccgtctgctgggcggcgagcgagccgaggacgtcgagcagtcgaggctggacggtcgcttcgatgaggccgttgagcgagacctcgaagaggagctgctgctgagctgctgacattcccgggcgagatccctgggggtctttgacggtgggctggagaagggcgtgatggtgggtcgtggtcggcggggcggcgagagagcagcctcggagctctgcgcgtcctcggttgcgtacgacgacagcccttccacaactccctgcacggctcatcattgcaggaaaaacctagctggatgctcaatgtcgttgtatctgcgtcaaacccttgcttcgaatctccctccgagtcaagcttgccaggaaacagtcaaggttaaggaggggactaaagcggccttcatgtagatcttctcccagccatcctgagcaaacgggacagcgagcgagaaacgatgaaaggtgaaggacacgcttagtcaaagagtccgaagcccatgtccttcgaggtagagggtagagggagagagcaagtcagtcaagccgctcgctgacgaaagtcttgctgaggaagagagacgcacgtcgtcagactcctcggcctcctcggccttctcctcggccttgggggcgtcaccgccggcggcggcgggggccgacgaggcagcgggggcggcagcggcctggaacgagagcgggaagacgcaaagtcagcaaaagcatcgcagcgaggcgacgagatcgaaagggactgacgtaagcgtcggggttggcaagacgctccttgatctggaagagcgaagggagacaaagttaagtcagtaaggcgtttcgtcaaagggggcgagtagcgaatcagtagaagatctagagtagaggcagaggtggtcggttcaggaatacaatggctcagcactgagaacggccgaggccgtcctcggctcaggattttcagtgtttaaaaagaacatcttttggaaggagagaggccaagcgggcgagctagacaagaaaaggcgcagacgggtggaacgcacctgctcggagccctcgaaggtgaactcggtggcgatcgagacggcaaggaggttcttgtaggcgttgacgagcgagtgggggaccgaggcgatcgtggggaagttgagggcaagcgagagcgaggcaatcgtcttgaccgacgagaggaaggcgtcgatgagggtcgactcctcgacgtcgagcatctcggcaccgaagagcgagccgttgtcgaagacctggacgatggtcataccgtacgtgaacggcgagacaccgagcatgttgagcagggtggcctcggacgttccgacacgggtgccggccgagacgacctggacgtcctggacaatctcgatcgttccacgggcaatcttggtcgggatctggagagcctggaagaacgaggtctttccgggctccatgccggtgttgccggcctcgacccagacgtccttgggggcgagcgcgccggcacgggccggggcggcgacgacgttggcgaggatctcggtacggacctccttgaggtcgcccgaggtgaagacaaagccgatgttgcccttaacgtgggggaggagcttctcgaactgggggtactcggcgaggatcgtgcggagcgcacggcggaccatcgtgttcttgcccataaggatcgtggccttgccgcggagcgactgacggatctggtgcactgagaggggtagcaagggaacaaatcagcgaccaccgcttgtcaaagagaagacgagggaccggctgggacgcactctggttggagccgacgttgtcgacgttgacgaggaagatcgacgggttggcgtcgatgagctcgcgaagcttgacgaagtaggcctccttctcggcacgggttcctcccattttggctaaaggtttgttggtggtggtgttggtctgcgaggcgggtgaggaagaggaggtcagcccgcctgcgagaggtcgttcgaacggagcgagaggcggcaaacgcacgggtgaagaggtcggaaaacggtctcccaagtgatctcgctagaacggatcaaaggttttttaaagactgctgactggcgagcggtgggcagacggtcgtcagtagattggctcgagcgacccgggcgaaagggaagggaccgacagagttgcttggaggagagaaggacgacggggccaaggcgaaaattcccttgagacgaacgggcggcgcagagcggcggcggccctactagcatctgcaagtcgcgtcttcccttggacgctgacgactcccgacgcgcagccacgctacaaagcccagtcactcctctgcagggcggacaaggtgtgacagacatgcgaataaggcaagaaggagggatcaagtgccgaagcgtgagacggaggatgcgaaattgcgaggcggctcaccctcagccagtgtaattccggccgagccggatcaggcgcgagccgagcgacgtcgacccagacgcctcagcggcagccggcggcaacggcggcgcaggactcgacggtccctgcgcgagcgggtgatgaacgcgtgacgggcgctcctggtcgtcgacgaccggcgacactgggccgccgtcactcgcaccgccgtcgaacccaccagcgccaccgccggggctcgtgttggctgaggcagcaggcgtccggccgccaaagagaccgaaaccgagcggtgtcgccctcatgcgcgagccttcgatggcgggcgagaagcctggctggtccgcgcgtgcttggtgggctagcgacgggtcgccgtcgagctcgagcgccggagcctcctcctgatcggcgtggtcaaacgagatcgagacggacgacgtcggtgacgacgcgctggcctcgcttcgctgagcggcatcgtagatcgacgagaggtactgacgcagctcacgcacgccgtttccagagtaaacgcagaaggcctcgcgctggtgggcattgaagtcctggagagaaacgagagtcagccatcgctgcagacgaggacagacagaagccagcatcgtcgtcgaacctttggcggctgccggcagaacttttggaggtcgcggctctggaacgcgggcacgcccgtcaggctgaggtgtgtgaggttccgcagccgctggaggaggtagtggatcgcttcgatcgagatgttgacgcagtacgagaggtggatccgctcgagcgaagacggccgctcgacgagtgcgtggattgcgtggtcggtcaggttggcgacctggtgatagagggggatgcgaaggtcagcctcggccgcacgctcgaccgaccctctgcgccaaaactgaccctcacgaggccgatccgccgaagcttcgacagctgcgagagttcgaggacgctgatgtcgctcaataacggacagcctgagaaatgcgaaagtcggcaggtcagcaatctgacccgcgagcaacggcgtcgcccagtgagagccgacgcacatgcgaagtcgacgtagcggagccgagtgcacgtccgcgccagacgcgagacggcgccgtcagtgatgctgagggcacggcgcaggtcgttagaggttatcgccttctctcttgctgcggaggcaacggcaggacgcaccacgagacgtggcccatgtgcagctggtgcagactgcggccgagccggcagatgctgttgatgctctcgtccgtgagctcaaagcactttgcgaggacgaggctccggatgcgcggggcgtttgtgatgatggcgtcgaccgcctggtccgtcagcaggacgcacgacgtcaggtcgagaatccgaaggtggtcgaacgaccgcatccagtttggcggcgggatgagtgtcgtcgagcttgcgagctcggtcgtcgacgggtcgggcgaggagcagacggacgagagcggcgttgtcgcctcgcttgccgggagaagggacgccggcgggaagagcgaccggttggcgttgaagttagtcgagctcgacgagcgcgtcgagggtgggaagaggtacgggaagccctggtcgtcgacctggccgcaattggagagccggagctcgcggaggtttgacgagtaaagccagacctcacggatgccggccgcggtgatgagcgggacgtcgacgaggtcgacctcgagcaggagcggacacgatcgggcgagcgcaatgatcgagacgtcggtgacgaggttgcacttgacgagcttgatctgcgacgcgcggcgacgggcgatagaggaacgttcaacggcagcctttcaaagaagaaggcgacagacgcacccttcgcagaagccggcagtttccggcgactttgacgatgccttcgtcggtcactgcgccacagccggttaagttgaggccttgaagacgcgggcagccgacggcaagggccgagatggtgacgtcggtcaagagccggacgtttgtcaagtcaagcgcgacgagctcgggcatgttgccatggccgagaacagtctcgagcgcgtcatccgtcagcttcgagcagccctggagggtgagccgctcgagccgggcgcacgggcgcaggtgatggaagacgcgatcgtcgatgccctcagtgatgttcatcaggttaaggcgacgtatgaagtgggcgtaggggaacgtcgccggtggcctcgctggcggcggattcggatccgtcgacggcgtccacgaccggggtggcgggtcgatgacggccagcagccgatggagcgtcgtcaagcggtagaaggacggcttgtgccagaggatctcgaccccgacctggcaccacagatgggacacgagcaggcatgtcttgaggtcccgggtcgacggcaggaatttgaagatctgggacacgggtgcgatgggtcaagttagatagtgccgagcgagagaggagatagctgccgcgctcgcacgaagacgatcaccgctgcgcacgacagagatggacgtacatggacccaaatctcgtacggcagaaggtcgccggccggacatgcctccttaccggacgccgtctcctcatcggtgtcgtgcgaggccctccggaggccatcaccggcggcgagccccttgcccttccagatggccgccgagcgcgccgggccaagcagtgcgtgctcgtcaacctcaaactcatctggcccagagccatccgagaccgaggtcgacgacggcgaaggcggcgcagcgccaattgtctgaaccgccgaatccgagaggtgcggccggaggtcgctcatggcggggaagcaactcgacatgacacggcgatggcggcggtgagacggcggcggcggagctcgaggcgcagcgaggtaggagggcgggagggacggctcggtcctgttcgctaaggcgcacggcgacagagtccggtccaggctgagggacaggcgcgacttcaggtgagctggaaggtcgtgcgacaaaggcgatggaggttgggtcgggcgtcgtgtgagcgtgaccccgtcgatgaccgaacactgtacggcggtgggcgagaggtgcgggcgcagagctgcaggaggagcgcccaggtcgttcggcctgatcgttactccgaagactggcctggtctactcgtcggccgagctcgcaagacgtctgaggtccgttcaggtggcgaagaaggagcaaagagagggacggaagggaggctcagaacgaagcaggtggccgtgcgaggggaaggcgcaaggtcgggagccggccgtgctttcagccccagccatcaccctgtcctatctctctcctcatctcgtcgctttttgtgcctgctagtcgggccagcctgccgttactccagagatggaagcagctgccgttgatgacctcgtcatcgaaagggtgcgtctcgagcggcatgcgcccgagctcgcagcgtaagatgggctcgagctgacttgtccgccttctcgcagaccaaactgtcgtccgaccaggtcgagctctacctgctgcagtatctggccgccgccgagcatgccgtcctgacgctcccggtggtgtgtcctcatcctgactgagttgaagagtgaagcccgtctggctgacggcaagctgttcctcacctctggtcggtcgtcctgcgcgtcgtgctgctcggccgctcctaggaggatctcaagccggcgcaagcagccttcgaggccgctctcctctctctcctgacctcgagcccgccaaaaccaggccggtcaatccggcatctcatcgcccgttgcatcgtcacccttcacaagcgatccgagaaccggagcctggccgactttgtccaggagatcctccgcgccgcgagcaccgagggaggtaagggtaaggaggtcgagcgcgaatgcagagtgtgagtgatcgttgcttctgcccttcgcagcgagaaggctgactgtcgcgatcgaatcctcagcgcctgctggtacgtgctcggcgagattatgaaggagctcggagcaaacgtgagttcgccgctcgaagctcgattgttgatgttctccgctgagagcttcttccccttgtcactctgcgccagaacatgtccttcatggtcgacatctgcgcggcctcgatccggctgctcagggcctcggcacaggttggtaccggctcagcttctgctgcccgcgctcgcagctgacgcccgctgctcttccgccctgctcagcctgtgatcctccgctaccaggcactcgtcgcgatgcagaaatcgctgctctcagccggcaaagccgtccccgagccggtcggcagagatctgctcaagcaactccggaacggcctgtcggataaggctctctgcatccagcgcgggtgcgccgagacgctcatcacgctaagccagacgacggcgtacgtcagcggcctgtctgagattgaggcgctcgtcaaccaggcgatcaagtcattggacggggccgacacgggcgcccgtggctcgctcgcgaaactcgtcgcccactttttggccgggacgcaacgcgagggctcggcgcccgtcgtcgcgcccaagaagaagggcccgaaaaaggagggcgaggacaacgatgacgacgagggcaagctgccgccaccaatgacagacggcccgcggacgctcctctcgctcggcgacatgtccaagctgctgtcgacgcccttcaaccggccgagcacgacgcgccgggcacgcaacgcgctcgtccaggtctacgcgagcctttttgccgccctcggaaccgactatgtcgaggcccactacgccgagattgttcagcacctgacaggcgacatcatctcgcacccgcggaacgcgaccagcgtctcgcggcacgacgtcctcctgctccggcgctacgtccgcatcctccttcgcaacgtgattggcgtccggctgctgagcgagcagggccagatcggtgcgatccgcgagcttacacagatctacctaaaaaagtggccggcgcttatgccgggccaggtcccgccgtcgcacctcgtgctcgtgcccgttctcgacgagatctcgggcctgctcgaccagctcggccaggcacctccgaccgtccaggaggtcctgctcgagccgctgctccggctcgtcacccaccctgcccactctgtccgcgtcagcgccgcctggtgcctgcggtgcttctgccggacgacgcccgccaggctcgacagcacgatttcggccgtcctcggcgagctcacgaaggagattgcgacgctcggcacgcccgtcgcaccagctgacatcggctcgcgcatgatgggccgcgctctcgccctctctgccctcgtcgccgtcatccctggccggccactctacgtctcttacgaagtcccggccaacatcctggacgtcgccatctcactcctcaagcggtctggcgagcaggaagtcggcatcgctgccgtccagatcggtgtcgcctggacgctcgtcggctcgctcatgacgctcgggccgagcttcgttaagctgcacctgccgcagctgctcgtcctctggcgcaacgcgctcccgaagccgacgtcgaaggacacctcgcccggtgcccggggcgagggcgagtggcgtttcctgctcgacgtccgcgaggcgacgctgtcatccatcctctcgttcctccggcacaacctcggccagctcgtcaacctcgacgtcgcccggcggcttgtcgccctcctctccaataccctcactttttccaccgcctttggcacgcagtttgctgagcggctcggcgagcagcaggtcccttcctcgatgtcgggcgccgtcgcctcgcccggcctgacgctgctcgagcgagagacgatgcttcggcggcgcgtctttcagtgctttgccgccctcggtcagtcgccggcgactgaggctctgcagtcgcagctcgtcgcagccgccgtcgcctcgtttgccgatccggatagctacgccggctcggcaacccaggcggccattgccgcaagcgcgggcaacttcaccagcgtctgggccgccagcgatggctacgctttcggtgtgacaagccttgtccgcggcgacgagttcccgagcgaaggcgagggtgccgagcgcgcaaccaacggcctcaaccgggatgcggttgaggttgagatcaacgccttgctctcgtcgcccattctcggcgcactcgactttgatccgcttgatctctgcatcgcttctgttggagaggcggccgacctgactttggagcagcctctgccccagtcagcgcccccggcaacaagcgtgaccgatgccgccatcgagctcttcgctatggccttcccctcgcaggatccggacggccagactcggatcgtcgccgaaattaccgcccacatccggtcgtccaagctcgagcgcaaccccggtcgaaagatggcgacgacgatcaatgcggtcgaggccttgcggcgaggcctacgcaaagccatgacgagcggccggcttgcacgcgaagccgtcgggtcggcctcggtctcggcggcgatcaaggaggtccttcaggtgagctagaattcttctcgctctcgttgttacctgcatctgatttatcgccttctccctgcgcccgccccttaggatgccgtgctcgactcggatctctcgcttcgcacggccggaagcgaagccctcggccgactgagcagcgtcggatcgaccgcctttctcaatggccagatccagtggctcattgatcagattgtcaacaaccgcaaccccgagtcgcgcgccgggtgcgcacagacgtttggtgcgatctacacctacgtcggcagtctgatcggcacgccggtcctcaagacgatggtcaacatcctcgtctcgctcgccaccgacccgcacccggtcgtccacttctgggccgccgactcgctcgcgcgcgttattgccgcagccagtctgtcgtactcgccatttgtgtcgagcacccttgggcagctcgtcgccatctacaacgccgagacgcacgagcccgagggaggctcggtcgggagcgccaacatccgtggcgacctgccggcctaccagggcctgtgcaagatcatcagcgcgctcgtcggtgtcctcgggcccgaactcgccgaggccggcctcgcccggtcgctgatcttcatcgtcgtcggcgagctcgcgcttgaggaggacgagggcatctcggtcgaggccatcaagtgccagcagcagtttctcatgtttgcgcccagccaggtcgacgttccgcggctcgtctcggccttccagcgcaatctcgtctcaacgcgccggccgctcaaggtggcgtcgatcaacgccttctaccagctgatccagcgcgacgccccgctcatgtctaagctcggcggcaaccagctcgtcgaacagctcttcggcctgctcgatgacgacccaagcattgagggcgtccgcgacgtgatcgctaactgggcgaagcagacgtcagccgtctctccactcggctgggtcgacctctgccagcgcatcatgaaccggacgacggcctcgcaagttgtcgcgaccggcgcctcgaatcaggcccgcgtccaagacgacgagggccagtcgatcgtcaccggtggcgagaccaagaccggcggcggccggctgaccacgcgctggcggacgcagctgtttgcgctgcgatgcttgcactacgtcgtcatggcggtcctcgcggccaaaaagcccgagcactttgacctggccctcgcccggcggatgggcctcaatccgaaggcgatgcttgcctcgcgagtcagcgacctcattcgtatggccttctcggcctcgacggcgcaggtaaccaagatccgcctccaaggtctcgtcgtcttgcgggatgtcatcgaggtccgcccaatactccttgacgaccgttgccacatcgctgatcgatcctgcaacccaccgcagcacttccgcctgtcgcccgacccagactttgagggctccctgctgctcgagcagcatcaggcgccgattgcagccgcgctgacgccggcgttcggcgctgactcgaccccggaggtcctggccagtgccatccagatctgcgctgtctttgtcggcagcggcgtcgtcaagtcggtcgaccggatgggtcgcatcctgaagctcctgacgacggcgctcgatagctgcaaaggttcgtgatgctcggcagaccagccttgtgcccttggctgacgtcggctgcgtcctgctctctctctctcccagacgccaacatgcacgccgtcggcgacctcagtaacctttcaaccaacgctgccatcatgctcaaggtttcgatcctcaccgcatgggcacggctccaggcggcgagcgttcagcagtcgtacctccgggacgtcgtcggcccacaacgggcggcgctcgtccagttctggatcacgtccctgcgcgactacgcccggattcggaccgaccaagagacatcgaccggttcgccaagcatgggcggcaacgtggatccgatggcgtctgggctcggcaaggaggtcctcctgccatactacgagcttgcctgggcaccgattctcgaggccgtcagcaaggtcatggaggcgagcgatccgctcgtctttgcggccatggacggcatcgagatcgtcgccggcgctcccgtgcccgagccaatgctgcagcggttagagccgacgaccttcttttgggtcctttacggcctggcgtttgaggctgccgcggcatcggccggcgacctctcgagctactactctgagtctggcaccgctctgccgatcgtcgccctctcggccctcgctcagctcgtcgaccggcgcttctcaggcaacgccgtcctcgacgggcccatcttcaacgagctcctcaccctcctttaccggctcgtcatggtcggccctccgtcggcccaaatcctctgcgccaggctcatcgtctcgctcgtcaagagtcacgcaggcgagcttgccaagatcacgcccgggtaggtcacgaccgcgcgttgcgccctaaggtcgtcccctgacgactcgtcttactgcctgcccgtccccagtgtcgacggtgtctcatccggcaacgagcagatgacacccttgcttcgctgcctcgcgctggctgctttcatcacccgcaaggccatcccctcgactgcagagccggcaggtgcgccgcctctcacccgctgtccttggtcgatcgcaactgaccttcccttggacactctgcagcgtcatcgactcccccgtcagtcagcatcgcgctcatcaagcaggccatgagctcgttcatcgagatcgtagacatccttcctgccggccagaaggaagaccagctcgcggtcgtgacctacctttttgccgagctcctccgggacgagacggccaaggccgatctggccggcccttgcctcccgctcctcaaggccatctgtgaccgggcctatgcggctcgacagcctggaagtcacacctacgcgcgcgtcctccacgggctgctctcggcctgcatcctgcacgtcgacgagatgcggtacgtctcttggtggctcgatgcccagtgtcagcctttcctgtcctaacacactccctctcgcctcgtccacagcggtcgcacaggatccgccgtcgtgcttaagatcaagaacaacacgtttgctctgacgttgctcctgacgacgctgccggccgatgcaccggtcagcagggtcgtcgtcgagcggacatgtgcgctgatcggagaaagactcgcgcaggccgacgaggtgcgccttcattcttcactcccgcccccgccgttccgcgctgatcgtttgcgtccctcagatcggcgtcgtcgctgtccagtgcgccaagacgctgctggccgcctcgatccggggtgcgcctgcgatgcgctgtgcggtcggccagctcctcccagcatttgtggcgttcgtcgcctcggtcgccgagctcgccgacgaggtcgagaaggacgagagccggctgagcgcgctcgacgacgtcgtcaagtcgttcaccgccttcgccgtcgggctgccagaggaagagcagagtgcgtttcgaccttccctttttgttgttttaccggcagcgctgacctctgcgccctccctagaaacccgcgccttcgccgtcctcctgcccaccctcatcctcttgctcgacccgcaagcggcgagtgctggtgcgatccacacgcgcatcgtcggccacctgctcgccctcgcgcctcaggctccagcggccttccgggatgcgacggcgacgctcacgcctgaggcccggacgacgctcgagagctcgatccggcagtcgatcacccgtcagcaggcggcgagcacggccgaggtgcgcaaggcggcaccggccatcgccctcaagacttttggagcctgaaagcgctcgctcgcacgtcatccctttccttgctcccatctcttacacgacatctcatgaccgactgctcgactctgagaaaccttgcgctttaggtgcatgacagccgggtcagagaactcattggcgagaagggcgatcgaccttgatttatttcgcgccggccgggcgacgagctcgaccccgatgcaacgaccctacgtccgctcctctccttctcactcaactttccttccctcgcactcgaacctcccttgccaccgtcctctactcttcccttttctctgtccctctctttcttggcattttcgcatggacgccgtcctcctccttccgctgctttcgcagtcgctctcgtcggacccggctacccgccggcagtctgagcggcagctcgcccagcacgagtcggccccgggcttcctaatctcggtccttgccatcgtccaaggcgcgggcgaggcgccgatggagatccggctcgcggccggcatctacttcaagaatgccgtccgcaagatgtgggccgaggtgcgtcctgctgtcgaggcaagctctccgggcagccggcagagctcgtcgaccgacgcgtcgccttgggccgaacactcagaggacttgctcgctgaccctgctcctctgatcgacatcgtacgctcatgcttcaggaatcgacgccgctcgtaccatcgcagcaggaccggcagctgattaaggagcagctcgttccggtcatgatctcgctctcgaccccgcaactctcgcgactgcaggcccaggtgcgccggagcccagcgtctctccaagacgaacgcacgcctgactgaccaagactgacctgctcgacgctgcaggtcggagaggctgtcgcttcgatcgccgagctcgatttcccgaatcagtgggagggtctcgtcggggtgcgttgccgaccctacctgacctccgcgacgaccgtctctgacagcctcacctcttgtccgcctgcttcagcaactcgtcgggtcgatctcgcaggacaacttttcgatcaacatcggcgtcttgcagacggcgcactcaatcttcaaacggtggaagtcgcagttcgcgtcagacgacctctaccgcgagatcctgctcgtcctttcccagttctgcgggccgtacctccagctcttcaaggtgcgccgccgcccctcattgtctcctgcttcgtagaggtgctgatgtgctgtcgtctcatgcagcggaccgaccaactgctcaatctgccgccagaccagctgccgccgacggccaccgtcgaacagctcggccagacactcctcctcctcctccagctcttctacgacctcaacgcccaggacctgcccgaattcttcgaggataacctcgccctcttcctcggtgacggcaacgaggttggcctgctcggcaagtacctccgctgggagcggtccgagctcgtcggtgacgacgacgacacgacgccgtcgccgctcgacaagatccgggcccagatctgctcgatcctcgagctcttcacgatgcgctactcggacgcctttacgtcagccctgctcgggccgtttgtccagctcgtctgggagttccttgcgggtcccgtctcgcggtcagagagcaccaagcaggacgtgctcgtctgccgggcgctcggcttccttggcgtcgtcgtcaagatgggcaccaataaggccatgttcagccagcacggcacgctcgagcggctgatcgagatgattgtcctgcccagcatgagtttgcgcagtgcgttcccatcgccggcctatttttttcgtgaccacgaagcactagctgatcaccttccgcccccgccgcagcgcacgaggaggagatgttcgaggacgatccgatcgagttcatccggaccgacatcgagccctcgaccgagagcgacacgcggcgtcaggcggcgaccgacttcacgcgggcgctgatggagcagtttgagggcgaggtgacgagcatcgtcaagcgctacatcgacgcgtacctgcaggtgcggccgtttgcttgcctacccagttttcctggttttcctggttgagagactgacctcttctctggccgccaacctctcctcagcaatacgcctcgaacccggctgccaactggaagagcaaggacacagccatctacctgctgacgtcgatcgcctcgcgcggagcgaccgtccagcacggcgtcacctcgaccaacgtcctcgtcgacgtcgtccagttctttggccagaacgtctacccggacctccagagccctgaatcaagtccaaacgtcttcctgctcgtcgacgccatcaagttcctccacacgttccggaaccagctcacgaaggagcagctgctctcagtcctgccgttgctcatcacccacctgtcatcgcccaactacgtcgtctcgacctacgcggcgacgacgatcgagcgcgtcctctttatccgcgtcaacggccaggctcaattttcgcaggccgacgtccggccgtttgcgcaggacatcttgacggctctctttggccggattgaggccggcggcacgcccgaaaagatggccgagaacgactacctgatgcgctgcgtcatgcgcgtcatcctgacggcccgccaggcgctcacgcccgtcttctcaggcgtcctccagcacctcgtcggcatcatcggcgagatcagcaagaacccgagcaaccccaagttcaaccagtacgccttcgagtcggtctcggcgctcgtccggtgaatctttttgaggtcatcctgagaggcctggggctgccctgcttcagagctgaccgtgctcttgcgctcgtccccagctttgttgccgagggcacgccgtcgtcacttgcccagtttgagggtgccctgttcgggccgatcatggccgtcctgcagaacgacgtcgtcggtgcgtcgtcttttgctggcgagggtcacacctgccgtgctgacgtctgctcgcgcctcagaatttgtgccctacgtcttccagatcctgtcacagctgctcgagctccacccggtcaacgagctcccggaggcctactcaaacctgctcggccctctcctgaccgccgccctctgggagcagcgcggcaacgtgcccgctctcgtccggctctggcgggcactcctccgccggggcgcggcacagattgttgccgcgaaccaagttcaggcgctgctcggcgtcttccagaagctcatcagctcgagcgtcaacgacgtccacggctttgccctccttcaggcgctgtttgagtgcctgcccgtgtacgtcggcaccccttcggcacctctcatccgttcgtcgtgctgatcaacttggacgtctctcgcctttgctgccgtcgtatttcttcccctcagctctgcccttcagccttacacgcggacgatcctcatgctgctctcgacccggctccagtcgtcaaagacgccggccttcacctactctttcgtatactttttcgccttcgtctttgccatcaagaacgagggcctcacgcccgacttcatcatcgctcagtacgagagcgtccaggccgggttcgtcccaccagctcagcccggaggacgccctcttttgcccgcttaccgactgacttcccgtccccgtctctcagcatcttcctcggcatcctccagtcgatcgtcctgccccagctgcaaaagacgtcggccaaggaccgcaaggtgatttcggtcggtatgacgcagctcatgacgcagagccagtcgatgctctcggagccgttcgtgaaggcctggtgcgtcccacctgattaagctaaaccaagctgaagggggcgtccgctgacgagcgccctcctcatgcgtttgcaggccggcgacgatggacgcgacgctcggcttgatcctcctccctcaggatctctcgtcgtcggccgcgcccgaggacgaccttgcaacgctcgacccggaggacgccggcttccagtcgtcgtttgcaaagctcggcgcctcggaggcggccgtccgcgaggacccggcaaagcacgtgacgaccgacgagaagacgttcctccgggccgagctctcacggatcggcggccaggttgggccgttgctccagcaggtcaacgctgaggccctctcgcgcctccagagctagagccccctggcccctttcatgacatgactgcactgggcttcgatcgagagaacaagtgcatacagcgagagggccaggtagacgatcgcttttgacgtgagggaaggagacaacgcgagaccagtccccctctaggcgataatctcacctgcggcgtagatgctggcaccaagccagcggccaatgtcctcgttgatggggccgattccgggaatggccgcaagtggaatgacctgatagcgaggccagaggacggtgccctcgttgttgcggatcgcgcgcgccgtgcggcctgcgaggcccgaggccgaggcgaacgccacgtcaggcgaggtcgagccgtacgagcgcatgttgcgcgtcatcggcgagtcgatcaggccggggcagacgacgcagaccttgatgttgtgcgggaccgagagctggcgtggagggaaaggcggggtgtcagaggagggacggggcagacgtgagcgacagaggggcccggcggaagtacgcacgatgcgaagatgctggccgaggtggtagacgtaggctttgctcgccgcgtaggccgcgaacgtcgcgggcgcaaagagcccggccgacgaggcaatgagcgcgatcgagcctctcttgtagggccgcatcgcctcccaagcggctagggcgacctttgccgttccttggacattgacctcgttctgcaaaaggggggagcgtgcgtcagtgaaggcagccaccccagcggcaccaagcgacgcactgtgtaaaggcagaggtccatcccccactggtgagtgccggctcgttcgtaggcctcctccatgtggccgctgatgccgctgacggcgacgagcaggtcgatcccgccgtgcttgagcgcgagcgccttgaagagagccttgtactcctgcgcggtcgttttcgcctggtcgtgggtcacccgctcaaaggtcgcctgtttcggctcggcgcactcggacccttcgcggaggaggaggatcaggtggtgctttggcgtgtcgtactgccggaggaaggcgccgccaatctggcctgaggcgccggtgatgacgaccgtctggatgccttccggctcgcgccgggggacaagcgaccggaggagcgagagcgggacgagcgggaggagggcgagcaggccgagcgtgctggcacagatggccgagatcgagcacgcgatgttctcggcgaggtagccggccgaagggatgtcacggatcggaaagtagctccatggcgactggaagcgggtaagggtgccaatcgcctcggacggtcgctgctcgcggcctggcgacacgggagagatgaaaggcgatcagagctgatgtcgacatattgcacgtaggaagagagtcgctcacgctgctggtcggtcggcatcgtgctgagtgcgggtcgaggctagtggtgtgaaggttgaggaggctgctgcgcgtaggcgggcgggcagaagggagaggcacagcaggcagatccggccgaggtcagaaagcaggtcaggcatgctctagaacgcgcaggttcaacttaccctgttgagatgagaaggtcgtggtggtggtcgaggtcgagagagagagatcaagtctcgtccgatgcctctccatcggcaggatgacgcccgccgcctgcatctgcagatgatcactccggctgagccttccggtttgagcctgcagggcacgaacgagaggcagcggccagaggcacgtgccaggacgatagccaagcgagacgctctgccattctcgctctgctggcctgccgcagagagagagagagagagagagagagagagagagagagagagagagagaagcacgagacgacgaccggtcgtcctgctgctgctgccgtcgagtcaagctgcgaccggtcttggccgttgctcactctcgaccagcacccgacccagcatcagcagcctgcgatgggcgccttttacgacgaaatcccgtcgaacccagaccttgctgcatggattgccgagcagagtgcgtccttctcatcgacggccggccgtcctggcgtgcgagctgctccttagccccgcctcaactgcgccgtcctcccgtgctctcgtccgtcggctgatggacctcgctccctggcacctccctcccgcccgcagagatcttctgggtcgcgagcgctcccttggcagctgatgggcacgttaacgtctcgccaaaggggacggtcgacacgctgcacgtcgagtcgcccaagctcgcctggtgtgagtcctccgctgggtcagacggcgcccacagcatcgttcgcctcgagcgacgcatccggctgaccacgcagacctccgctgccgatgatagatgaggatctcagcggcagtggggcagagacgtatgcgcacattcaggaaaatggccgagtgacgatccttttctgcgctttcgtcgtgcgtccttcgacggccccgtcccatcagcggcacttagagggcgctactgactccatcccttcgcttattccccttagggcccgcctcgaatcgtccgcctgttctgcaccggccgagcccacctccgcggctcgcccgagtaccacgcccgcatactagcggggaccgagcgccccggctcgcgctccatcatagtcctctccatcaccaaagtcggcagctcgtgcggctactccatccccgagtttgatttcgtccgcgagcgcgaggtcctgaaccgctgggcggcgaaaaaggaggcgacgaccgactttgagggcccgatcgacgacgacgagagtctgcgcgactttaggcagtactggatcgccaggacgacaaggtcgatcgacggcctgccaggcgtcggccagcactatcttcctgaggaaaagaaggacgctagcagcgtcccgccagccgcctctttctcgtcgaagatgtgcgcctcttctgccgccggcgtggctaagcagcggcacgccagctggacaacccacctcccgctcgtcggctcccatctcgccgctgccatcctcgccgccggcttcgtccacgcccaccacctcggcctcgtcgacctcaagctcgtcggcgcttttctcgccgcttgcgtcgcctggctcgccggccaggcggttggcgcgcccgtccctgcgccgtgctgcgccgtcggtctgtgaagcgacagaccgtcgaccggctctcgggtttcttttctctctgggcttgtagctggcttgactctgtcgttgtatacgatccgcattgatctgctggcgccaaatcagagaggcccgagagcacgcctaggtgccttgccatcagtcagccggcgcagcaggcaccgcccgcacgagacgcgttccttttccctccgaccgtcgcgtcgacgaccgtgccttcctctcggcctcgctaacgtcgcgtccagctaccttgcgccctgcaggccgacaggacgctcgctgaccggcccagcttacctctcacctctcaccctcaccctccctccctcgcgcggcccccacacccagcttctgcgccaccctctcacagctcgacctcactcgaccgctctcgcacgatgctcctcctcagccgccactcttgcctctcgctctcgctcgatgcatttgaccgcccgcggtcgtcctcgtcgttcggctcgctggcagcctatcagccaaccactgcagcccgccgccatcgctccggcagccaacagtcgtctcgctcgtcagacgtccgctacgcgccgtacgagcggccgttcattccggccgagatgggcgccaaccaccgtttgctggtcgatagcgcgaggatcgccgtccaagttcggcggcggccaaagcggccgacattccggccgagaaagaatgaggtgagactcgtgacgctctgatgaaagcctaacgtcgattgctgacaccctctcgtcgaccaggacgttttccccctgcagctgtcgctcgctcgtgccaacacgaacaatcaccctcagcggcccggcgcgaccgatccggcacgccactcgaagctctctaccgcctgcctccagtcggctcctgccttctcatcaccgcccacctttacaacgcccactcgttccaacacgaatggtttcgggaggcaataccatcggccgtacccctccttctctgcccgcccgcccgcagccaagtctccagccgactctccacaggcgacaccttcgccaccgcccgcaatagcgacgccctcgcccacccggctggcggcccacatctacctctccgacgggtctccgccaccgcggatccagaaccggcggtcgcgcctctgtcggctactagccatgcttgacatcaacgatgactccagtcagccagctgcttcagcttcacaaggaggcgaccgccaagcgtactggcctcctcggctgtcgctcgggcctaagccgccgtcgcccctgccgtcgcagccatcacgatcgtcctcgcgtacgccgacgtcgaccaacggacgcggtggccttcggcaccagcagcatcgccgttgcgcggctgactggcgcagcctactcgacgagcagcacggcacgtcgtctgcgcccatgctgtcgtgatgggcgtcacgtctcaaagggggggccgtcatatgccacgccggcacgctcgacgacctcggcgcgatgaccatgaccgtacgatcagcacgccgcctcctgctggtgtcgacgacgacaagggcgacgacgtgtcggccgccgcaagggggaggcgcgcgcccaatccgaccgttccgactggtcacccttcgtccatgtcctacccttcccgtgattgcggtcgctttccacctgcgatgggtcgccagccgctctcgctctctcgctcatgctgctgaccgtgggcggacgcgcctctctcgagtcgcggggtctccacgtcggcgagatcggcgacggtcaggcgcaactggctgccgcggccgtcgtcgcccgccgtgcttcggattataagctcgcttcagcgcctggtcccgaagcaagatgcctagattgctgtctgtactcgtcaatctcgcttgagccctgttgcattctgggcccgctcccctacgcgcgacagaagggtctgcctcgtgcgcaggggttctcgacgccaatccgactcggtcggctgtcggacccgcggcccgcagcagggaatcacccccgccggccgaccctcctcttccttactcgctcacccctttccttctttcgtggctggtccttcactgctcagctctgtagctgacggactcgcaaaggggcagatctgctcgtcttttcgggcaagagctcgttgtcgacactggtcggcagggtctcacggagggcggcgggcagggcagtcgaggtttcgacgcgcctgctttcgcgtcgcgcgacacaacaaggctagccgtcgtcagggcgtgcgcgccggctccccttcgctaaccttgtccgccccccttctgaggctgaaacaacgccccccctcttggaatctcctgacacgcgacggccccgaggacgtgatcggcgcgccgtcgtcggcagcgggcggcaacgaacgagggcgaaggagaccctcgctcggggtcggtgctcgctcgtataaagggccggctggccgtcaacatgggctcccgctcttccctatcaactttcggcctgccttctcctcctcaagatatcgtcaagcatgctcgctgtgctccctacgttccttctcctcgcgcctgcggccgaggccttcttcatcctcaaccaccagtgcgtcgcgtcgagatcgtccgccctgtgccgcccccgcctccaccaagctcaccattgccgctatcccttcctccaggacgcttgttgtgtgagcaggatgcctgcgatcggctccaaatctttggtctggcactgacgcggtgtcccctcccgaccagcgaacgtctcgatcctgttgtccagcccggcgacgtctcacaggtgcgcgcgcatgcgtcagcggccagcccggcgcccctatcgcatgcactgacctcagtccctctcgcttgcagcacatgcacacggtcgtaggcggctcccagttctcgcaaaactacgattacaatacggccctgacgtcgcagtgcacgacggcgccagttaacatcgactttaggtgagtcttctgacgctcctcgatcctctgctgcgcgtcgccgatcgcgcatcctctgcacctcgcacttcaccagcaactactgggcgccgacgctctattattacgacccttcagtgtgtgcctccttctgtccgtcacgacgccgaaggtgcaacaagctgaccatcgtgctcgtctgcccagaactcgacgttcgaggccatccctgcaggtgacgtcaagacctagtgcgtccgcactctttccctcatcgcctcgcactatccgatctgacgacctcatgctctcgaacagctacctccagcggccgggctcgaagaacgagaaaattgttgccccgccggccgggctcaagatggtcgccggcagccccgtccggcggtcgtacgacgcgtcgagctttgaggaccaggccgtctctttcgtatgcctcgactactacaacgaccacactggcgacgaggcttgggcccagcgcaacaactttttcgagcacaactgcccggacggcatggtgcgtcctgactcgcgcgtcagccaggcagggcgaggttgacttgatgcggctattcatcctacctcagcgcgctcaagtgttcatgcctcagtgctgggacggcaagaacctcgacagccccgatcacaagtcgcacatggcctacccggtcgacaacttccagggcggtaattgccccgactcgcacccggtccacatcatcggcctcttctacgaatttgtcagtcgctctgccgtcagccccgcctgatgtccgagctgatctcgctctctgccagatcttcaatgtcggcgactttccgcacaacggcccgaacgagatcacctgggtcctcgccaacggcgacacgaccggctacggcttccacgccgactttacgatgggctggccgactgaggggccgctcggcaacgtcctccaggacgccatcgacacctgcggcctcgagacgggcggcgacgtctcggcctgccaggcctttgcgccatatatgtcaaacgctggcggctgcaagcccgaaacggcgatcgtcgacgagcccaacggcctcggtgcgccgctctcaaagctgccgggagacaacccgctctggattggcgacggccccaagccttccagcggaaacgctgacgaggcttcgcccgactatcggccggctaaggctatcctgcccgctggctggacgcgtactggttgcattgctgagggccccaagtacgtcgcttgttcgcaagagagcgtgccatctgacagcctgctgacttgccgctctctctcctcccctcagcggccgcgccctttcaaccgccagctactcggacgacaagatgacgccggccgtctgcgcctccttctgcggcaagcttggccttccttacgccggtgggtgctctgttgtctagttcgcctcgtctttgcctgcgactgagctgacatccggcctcgcaatcgctcaggcgtcgagtatggaacgcagtgcttcgtcagtcctttttcttaacggatcagagagcacgagcatcagatcactgacggcaacgttcttccttgtttagtgctcgagcaagacgactaacaatggcgcgaccggcgagcttgtctctgacgagcaatgcaacatggcctgcgggggtctggccaccgactcatgcggtgggcctgaccggctcacgctcatgggtcagctttagccttcactcccgtacgaagggccaagcaggctgacctcgactcgcctctctccgatatcagccaacccgtcgctcatcatcgacgaggctgccattaccgcttcgctccctactggctggcaggtcgggccctgcgtgagtgtcgctgcttcatcggaattgatgcgactcgtcgactgaccgcagctgctccttcccaacaggtgaccgacaacgtctccggccggaccctccagggcggctacacggccgacacggagaagatgacgaacaagctctgcgtcgaattcgtgcgtccggctcaacgcggtcggtcagacgaatctcgttgactgacacctttcttcttgcttgttttcccagtgctcggccaagggcttcgtctacgccggaacgagctactcgcaggaatgctgggtgcgcacgctcaatcagcgtatcatgccgcccgacgcagactgctgacgctcgttccacctgtttgctcctcgcagtgctcaaattcgctggcggtcggatcgtccgtcgccgaggatcagtcgacgtgctccatggcctgtagggtgcgtcgaaccgacgcctactgtcgactgctctcgcttactgacacccaaaacctcaacgctcacctcccagggcgacattcgcgagacgtgcggcggcagcaaccggctttcgctcttctttttgccgaagaacgcaacgaccggcaccggcgagggctttgtcgtcgccgacggtcagctcggccgggtttgaggcgctcactgaaagccacggccgcagagcctgcttcttccccattcctatcttgtcacgctcgccaacccctctgtatctatacgctcagccccaccctttaaaccaggcccctatccgatgagatgggccgccccgcctcgcaatcctcagcacgccttgtcagcctcgcacgagcgcccactggcagtcaacagtcggaacggtcgtaatatggtctcgaacgggagcgcgccggcacctgcgcccctcgtacaccttggcccctctccctccggccttatccctctcgcagcagcgcatccggccccacgacaatcgtctaggtgtagaacttgcggttctgtcggggatcaagcagcacgctagagttcagtgcttgcggcgagtgacagtcaagagaagcgctggggcgcacctcgttcaggccaaagaggtcggcccggatctctggtagcatcttgtcttcgagcaggccgagccgctcgtcaatcgtgttgttgacggtgatgcggttgccctcaccgacgagcttgatgccgccggcgctgtcgtccgcgagcgtctcgtctgagacggtcacctcgcacgaccggccagagagggccttgtactcgtcgatcgcggcggtcgcggcccgctcggcgacagccttgtcctttgaccgggcgatgacggcgactgccggcgagagaatgaggagcaggccctgcgggtgcagcagaacgattccaggtgcaaacaggggtcagtctctggctcgacgggtaccatgcgcgagaaccgggacgcacctggacaatgagcttgacgagcagctgctcgtacttgccctcgtcctggccgaggtccttgatgcccttgcgcgtctgctcgaacaggtcggccagaagctgctcgcgagcgcgcagaatcttcagccgtgacgtgttgagtgctgtcgactgggcgctgcgagaagggaagcagagaccagaacagggagcgtcagcggtccggccagtgccgactgcaagagggcccggcttgggagagaccgccgacgtgaaaactcacatcttctggcccgtctcggcctgcttgcgctttttctcgtacagggcgtcgatgttctggctctcctgccggacgatctttgcctgcagcccatagcggtcgcgcgcgcgcaggaggaagggggcaaaggtctcgtcagcgccgcatctcctggactgacatgactaggtggctcgagacagctatcctcggacggcacaggcatagaaggcccggatgcgagcctcggtgacgaggcaagcgtcggctcgagcagcccgcagcgatcccaagagccatctcgccctgtctcggcgccgtcaggggttcgaggagggccgagcgagagcggacgcaccttctcaatggcaaattcctcgtcggccttgacctggatctcacgggccttctcacgtgcctcctggctgatgaaggccacctggcgaaggtgaaggtgagggcgaggtcagggcgaggtcagtctcggcccggcctgacgtcgctctcgctcttgggcctgctcggcggagggcgatggcggccggtcgagctcgcattggccagcgcgacgcaccatcttgttcatctcggactggacctcatcgtcgttgtacgggcggggctgagacatagcgggcagggttgagagtgggagagttgcggtcgtcgaaggccgctcatccgccgtcgtcgaccctcgggcaggggcgatgagccgctcgggctgaccagatgcatcagagcagggctgatgcagatcgccaggacgacgcgacgcgccgccagggagacgcgacgagcgctgattgagcaggccatgttgacttcctgctcgaccctcttgaccaaggcaacagataaacactcgactccttgccaagcaagccggcacacttcagggacttttctgctagtggcgtttgcaagaccccttcaagaatacctctctaccccgcacctggcttgctcggcatggcgacgcctgctgccgccggcccgttgccgcctccaacgacgacgacaacggcgacgccgctccgtccggcttcagtctcctcggccggtccaccgcccgagacgcccatcaccgactttaccgcacttgagtcgcagaaggagaacatccagccgctctcgactggccggtcggccgccgccctctcgtcgctcttcgcggccaagccaaaggtcgtcgagcgcgagctgcgcgaagcccgcgaggcgttcgagcaagagctcgcggctgtcgaggcccagcggcagcgggagctcgctggcgaagactttggcgaggatggagaggcggacccactcgacgtctatgagcggtacgtttggactgctgctcggacggaggctgacatttggcactgacgtgagcgcgtcgcccgtcgcccgtcgcacgacacctccccttcactcccgcagctacatcaagcacgtccgcgagacggcaccttccggctcgacccagtcgtcgcttctcatcccgctgctcgagcgggcgaccaaagcgctcctgacggacgagacgtttgcccaagacatccgctacgtccggctctggatcgcctactcacggctcgtcgagcgcaagagcgacgtctttcagttcctgctcgaccgcgggattggcgtcgagtggggcgtcttctacgaggagtatgccgtcgtgctcgaaagcatgggcaggtgcgtttccttcggcggggttcagagctctgctgtacgggagctaactccgctcgacgctgtcgccgctcggattgtaggcgctcgcaggccgacgaaatctacaggctggccatcgctaggcgggccaagccagtcgagcggctcaagcagcgctacaaggccttccaggtccggatgatgacctcggccccgctgcccgtcctgccgacgccatcagcgacaccgagtgcatcgagctcgggcggccgagtcacgctcggcgcgctcggaggtggtctctcggccggcgcaatgccgtcgagtgtccggccggcgaacgggaaaaagaatgggctctcgatctttgtcgagggcagcacggctggcggagcggaaggcgaggacgagaatggcttcaggggtgacctccagacgagggaggctgcgagaaaggagaatgagcgcgaggcggtcggctggaggggcgagacgctgcctcagggccggggtcttgcccctcggacgcccaagctcgaggtcttccgcgacgaggtacgtcctggcgttcctcctccttcaggatcgccgccgacctgatcctacacctgccttgtggtacgtagggtgatgcaggcccgacgccatcctcgaagcattccgtcgacgacgtctttgcgcgatcctcgacccagcccgagtgggagcgtctcatcaaagatccgctcctccatatgcgcgacctgcctccggccccggcgcacaccatctcggccgcgctcgccctggcgccagcctcgatcccaacgtcggcgagccggacgacgccggcctcaacctcaggcttcatcgcttcgatcccccgttgggagatgccggatctaacgcctgccgtgtcgaagaatggcaagccggagcgaaggcgatggaactggaacgacgtctacgctggcgggcgcgagtggagctttgaagagattcgcgctcgacgggaaggctggctcgacggcgtcaatcgctgggcggcaatgggtgcgcctgccctcggcttggaggcgagagcggtgatctctgacataactttgcgcttatcgccctcgcctccgcagacacgaacccgccttgtcggccggccgctccagccgctccaacagcaatggcagcgccccttgcagcacctttggcaccgacgaccaggacaccctcaccgaagctcaacatctttagcgacgtcagccctccaattggacctaccccggcacctgcgccgacgccgtcgtcggtcacagccaagttgagtatcttttcggatgcaccgcgagctcccgcacccagttccaagaccatcagcccgcctgctccgcagatgacgcttgccccgccggtcgcgccggctcccatcagggcggagccaccgacgcctgtggcgccgcagtcggtcaaacgtgcaacccgtccctcgccgacgatcaacacgaaagctgctttgtcagacgtcatgggcttcttcaatgccggagccgacgacgacgacgaagacggttccgactcggactcgagcgatgaggacgaggacgagcaggagcccatcatgatggtctacgagaatggctcggccgtccctccgacgccgacgccggcctcggcccgaagccaggtctttgcgctaaagaggccgcaaggaccgccgtcgtcgctcgcagcgacggccatccaggaggatgaggacgtctttgccggcagcactgcgccttctgaagcccagtctttgccacctccgccgccaccttcggcagcaccgactttgaccgtcgatgagcaactcgctccgccgatgatcttccgggacgggaacgctggccggccgacgccgtccaagacgccgtcgcgaactccgttgtcgtcacgcaagccgactttcggcgtcctcgccgacacccgtgaggaggaggtcgagccgctcccgcagcagcctgcatttgaccctgcacccgcaccggcccagagccaaaaccagaacgtcttttcgaccccaatgccggccaagcagccgttccgccggccggcaccgctcggctcttttgccgaagaggccgaggaagcgtccgaggagtacgacccggaagatgctgagcggcgccgactcgaagagctcgaggaggacgtcgaggacgagcggcgccgactcgaagagctcgaggaggacgtcgaggacgaggcgtcgtaccgctctcagcgtggcgcctgggagggccgcgtcggtgccttcgaactgatgacgcccatcaccgagcgaacgggcgagtggtcgacccaaggccggtcgtcgatgggcgccgcacggtcgtccatcgcgccgaccgactttggcatcaccgaggaggaagaggatacaacggacgccgaccaggcgttccacacggcgacgaccaacttccgcggcgtctcccagtcgccgccgacggccagcgccaccagggacgagacgctgccgtcgctctcggccgatggactcaccggtggcagcatgcctagctcggacttcgaccgctcgtcctcggcaccttttgctctgtcagaggggtatacgatcgagggcaacactggccggaccgaaggcatgctgctcgacacgttgcagattgtcgaccagacgggctcaatgcagctcgacggcgagaacgaggcagccgtcgccgctccgccgtttaccgcaccgcctccgtccgcgcaagggtcaaagcagggcaagctggacgtggccaacccttgcaacccacaggaggcagacgtcgtccgaactgtcctggccgctctcgacccgccggcggcctttgtgcccggcttcagggatctctcgtcgacgcccatcaaccggctcgacagtctccagaaggcggccaaggctcggcagaggcgcgggagcaccggctcggccaagagcggcaagagcggaaagacgagccttgactcggcctcgccgtttggctcgctcaacctcggcggccacgagtttgaggtccgcgagaaaattggcgagggcggctttggggccgtctttctcgcgcgcgacgtcgcgtcctttgaggcggctcaaaaggactacgatgacgacgaggatgcgtccgatgccgactcggacgacgagggcgaagccaggcacctcgtcgcgctcaaggtcgagcgcccagcgtccgtctgggagggtgtcgtcctcgcgcggatccacgaccgcctgccagccgacctctcgcggtcgatcatcgcctcgcgcgggctctacaggttcgctgacgagtcgtacctcgtcctcgactttgcgagccagggcaccgtcctcgacgcggtcaaccacgccggccggatcgggatcgcgccttcggcccagggcgcggctgggatggacgagctcgtcgccatgtttttcgccgtcgagctccttaaggtcgtcgagggtctccatcgagcaggcttcatccacggcgacctcaagattgacaactgcctcgtccggctcgactcggtcgacaatgccgcttggtcgggccaatacgacgcctcgggcgcaaacggctgggcgggcaagggcgtccggatcatcgactttggccgggcaatcgacatgcggctctttgacgacggccagacctttatcgccgactgggcggtcgaccagcgcgactgtgcagagatgcgcgaagcccggccctggagctaccaggccgactaccacggcctcgccagtgtcttctactgcatgctcttcggtgcgtcgtcccccgattccttctgcacccaactgcgggcactgaccctctcttgtcctccaggcaaatacatcgagacagccgtcgcaccggccgaggacggcagcaacgcaaagcgctacaagattgcgacaccgctgaagcgcgtacgtcccctccccccctgagcctttcatttcgttccccagccgtccatcagctgacgacctcctcgcccgttcccgtcccgcagtactggcagacggacctctggacccggctctttgacctcctgctcaaccccaggcttgcgacgccctgtggcgccctgccggtgagtgacgcgctcagcgcgctccgagccgagatggccggtcagctcgtcgacaagtgcacaaagggcggcaagaacctcaagcagctgctcaagaagctcgagcgcgagtatggcggcgtttgaaagagggcggggcggggagagatcaagtttctaagggctaagactctcttttctaggctatttgctctctcgattacccccccccccccccccgtctcctccgatcttcaaccccgaccccttttaacgacccctcctacgcttcgtctcccgtttctgtcgctccatgttatcgaccctgagacaaggcggaagagaaagctggcatggaagatgaagctcgaggggggttgcgagagaggggccgtcgagcgaggcggccgtcagcgcttacttgccgaggatcgtctggaggtcggcgctggtcagccgtttgcgcttcgtcgagacgaaacgagttagaggaacgtgccttgagcatccggttgacctccttgcccgtctccttctccgaaacgatctgcgcggcttgcctcctggagggcagatgcagtgtcgtcagtgagcactgatacgcgtcggggcggccggcgagacgcaaaccggtactgctcggcgagcttctgcagctcagcgacgtgctcgtccttcgaggccttgcgctcggcagctgtgcgtcaccgatcacaagcaaggatcagcatcatcgagaggctatgaagcgaaggcacaacacgaaccgagtccttcgagccgatcgagcaccgctcgctgcatctcgccccgttcgtggtcgagctcggcgagccgtttgagaagaacattcttgcggctctgcgagaccaggggcgagcgggtttcagcagcgaatgggcttgtcgacagactgcatcgagtaagtccatgactgacaacaaactcattgtaggtcgagaagagcgtctcgccgtcagtcttgaggtatcgccgaaattcgctggtgagatcaaagagggttcgctcgtcgtccctgctcatcctcacggatcagctcgcgaatatgggcgtcgaagaggagcaacaccgctcacatgagcgtccgagtgtccccttcgacttgagcctgcgcctccttcatcgtcaagactgcgaggcggcggacgactaagcccatcgcgcattcacgcgtgaccaagctgccacgcacagataggcatgacgacgtcgttccacgtgtcggccggcagcgagccgaacttggcgttgtagatctctgaaggcgagaagatcggagagcggcatcaatgattgcgagagtaggcgcgggcagccgacggctgacggacgtactctcaagccgcgcgaggtgagcctcgtccctgggtgccggcggtggcctgggcgttagcgtctcgacagctcgcacagctaagtcgctgccagacgcaccgctcctgctcctggtcgacgactatctcctggagcgggccttggtctgcaaggccgaggccgccaaagatgagcgtgacgtcgtcctcgccccagtggtcgtcgttgccggcgtcgtcgccgaggccgcctgcgtcgtccatgtcctcatcctcgtcctgcgtcaacggcagctggaggtcgtcgtccattaggccgcccggaccgaccatcgtcgcgtccgtcgaggcgccggtgatgtcgtcggtcgtgcgagcagctgccgcggcagcagccggcctgcgctcgggcctcccgccgtcgagccgcccgagagggatcggccggaggagcgggttgaggcctgccggccgcggcgctggcggcggtgtcctgggtggctcgcgaggtggtggcgtgcggaagccgctctcctcgcgaccctcgacgccaccgcgtggtggctgcactccaaccaaccgccctgcgccggcgaagacgtctgaccggggttgctgctgctgctgcttgtggaggcttggtgccagtgcggagagcgagttcgacagtccgccctcgtcgccggcggcggctggagcggggtccggagctgcctgggccaacgggggctgctggcggtggccttgggcagtgtcgaaagctcgcgtcccgcggtcagccgagggcccggcggcagctgaggccggtgcagagaacggctttggcttgaggttgctggtgctggtgttcatgaggaactgggagatggcggtcgagtgcagaggtgaagggcctcccccttggacgcgaggagtaggccagcgtgctgcgcgtcgtgccccccccccctgcgccgtaatgcgtacttcccctcggtccacatgccaccgtcgcacgagcaagcgccagacaagaaagatcaccaggtgcgcacaatgtctacagagggctcatccgatccctcgcgccatctagagcgccgccgctccgcccgggtgaccgagcttgtcaaagacctcggcctcgagcagcgcccgcagcttcggccagatctcgttgctgctctcgcccttgatcgagtacgtgagctcagggaacgtgttaccgtagctgatgagatagattaggggtcagcggatctttggcggccgcgaagccagcgacgatcacgcactaggccaagagggggaacgtctcgcgattgtacaggtccaatcgcttctgaaagacctcctgcgagtcagatagtgaaaggcaaagttcagcgctcgtaaagaatcgtccattggaaggggcctgccgcgcacaggcgtgtcatcaggccgcttctcgagcgcctcgcccgtcacgtcgtccttgccctcgtggaggggagcgttgtacgtcgagttgtagacccggcccgacgggacgtgcacgaatcggtctgccgagggagcgagagcctcgggtcagccttcccctcagggcatctgcagtggatcgcgccgcaccctctatccggctgaggatcgtcttatcgctgacgccgaggttgatgatgaggttgagcccgcgcccgcccttgacgagagcgccgtcgagcagctgagcctggttgaccgtccgcgggaagccgtcgaggatccagtgctggccgcggagcggctcgagcgcgcggagtgcgatcccgagcatcagctcgtccggcacaaactctgctcgaggcaaagcagagccgaggtcagcctctgacaacttcagaaagacataagccggcggacgtaccgccgcgggcgacgaggcccttggccttctggccgagctcgcttccctgcgcaatctcttgccgcagcacgtcgccgacgctgacctgcgagtgcgagtacaaggtcagttcttggccgacctgctctacgaagctgattaacgcaccaggttgacgtccgggtaggtgtcgagcaccttttgtgagagtgtgcccttgccggagcccttggaggcaggcaaagtagccgtcagcacgcaggccccggcttagtcgaacgaatcggccagaatttacaggcttgccgaagaggaccatccttaggccctgcggtcaaagcggcaaggtcgcgtgcgacaggatggtggaagaaggcgaagagtgaaggcagatcgcgaaaggatgggtcgaaggatgcgaccgacgcgcgggcataagcaagggcggttgccggcggcagttggagcaggatgagatggagtcggcagcagcatgtttgcggcggcaggtcggcaaaggcgtcgcacgattgtcgagaggggaaatgaagaggtcaggctgtcagtacacgtctctatttgagcgagctggctttatggcaagaaggacgaccggctcccgcatgtagagccggcgacggcggctccccagccgacgcgcgagcttcggccgcggtgaggatctcaagctccgagcaacctccctctcctcctcggcaggcaaacgagagcaaggatagcacgcacaggttgtggcgcgccctcgaagctcgagctctcgagcgtcgcggccggcgcatcagtcgaggctggcgtcgtgacgatgaagcgccggagggtcggagagcgcgagctagagctctcgcctgcgctcgcgcggagggcgggtcggaagctgcccgagacgaacggtcgggcggtagggaaagcaatggcgaaaggtcgcgaggacagccggagcgagagtcggggagtggccatcgttgggcagggtggagaaggggggggggatgtcggtcggtcggtgagttgagggaggcaaggtcggctgaggcgccagagaaacgacgaggcggcaacaagcgcgcggcgcgggggcggggcggcgctggggcgaaagcgtccgataagtcgtcttcaacctagggcacttagggtgagtcaagtgggaaaggggagcatagtccagagcgtaagagcatcatgacatgtagatgcagtgctcgactgagtgtgggctggaggggagcgtgtccgtgagtgagacaccatcccgggcgacgccgaccaggcgcagctctgaggccattgccgcatgccgctagggccgaccgatgccagacgcgacgatatgtgcttgccattgccaggcgggtcgggcgtcgaagcgtccgccgattgagcctggttgagggaaagcgcgcggtgtcgttgccgttggttgggcgggcagcgcagaggggaacgagagtcggcgggaccctcaaagacggcgccgcgactagcagcgctcgaacgtcttgtagaggtcgggcagatcggcaatctgcgtgacgttcttgttcttcagcagcgactttggcgggacgaggtaccgcttgatggccgggagcaggacgtgctcgagctggaagagatctggtgtcgcggcggccggtcagcatcacgacgattgcacaggtgtgtcgcttgagacattgtaccttgcttgtgctcctgctcgtgcaggtccttctcctctgtagagagtccatcgacggggccgatcgggacaggaatgtaaaagaaggcgagctcgcgaaggaacgtctcgaagcactcttgttcggcctcccaatcgacctgcgtcaacgcgaccaggccgagcagggtcagcttatcgacggccactcgtactgagggacgagtcaagactcacgcaagcgccgagccgcatcagaaactgcggcaaccgatggaggtcgggcgtgtagccgtcgagcacggccggcaggcactcgagccggccatcggcggtgatggtgagcgaaaagtactcctcaagcatatcgcgtccgtcgaggaggcgacgcagcaggacctctctggcctgcggccgccgatccgtcgggaggccctcttcgagctcaagcgcgacgtcgacgagggcggcgatttctggcggcgggtcgagccggatcatgtcgatctcgccaaactgccggaggccgagctggtagaagagctcctccctgcgagccagcgacattcagcgcgatgccttgagcccgcgatgccgatcaagacaactcacgcaagcgctgcatggtcgacgaggtagaggcgtgtgctgtgctggaggagcgacagcgacaggtcgtagtcaacgacgccgacaaacttgtggtccttgacaatctcggagagagctggcaggtcgacggcgtcaggtcacagcggtctgctgaacgagcttttgtggaacttacctcggtggcgagcgtgctcgacgtctgcgcgcatcgctcggacgctcgtcagagtcgtcgccgactcgcgtattgatcggctggaggccacagctcgatgcgactcggcaggatcgccagcctgattgctcgcaccgatccagtcgacgccgtcgtcctcatcgtcctcttctgcagacgacatgtcgacctcgatgacctcggcggtccgccgccgcttcgcttcccgcccgcccgacgcctgcgacgccgccggccgctggacgggcgcaaacatcgagtcgagcgtccggacggtcgggtcgctcacgcggacctggtacttggggttgttcttggccgcgagcgcctttgggacgatcgacgagctcttcgtgctgtaccgcaccttaggatccatcaggggatggagctgcgacgaggaggacggcccagcctcgtccggcagctcgttttcgccagagaggtcgtcgcccgtctccggctgacgggccgtctctcttcccttgcccttgtcgcggacaaagtcgccgagcgtgctttgcgtgctctgccaaagattgccgatgggcgaggagagtcagccggcgtgcgctcgagcagacttcctcgggctggacggacctcgatggcaaagtcgcgcgactcgttggcccctgcaaggacctgctcaaccgcacgacagatttcctcgacgacctcttcctcgtgcagaaagtgaacctgcagcatcgccaagagcggccgtcagcgagcttgcaaggtcatcagggctgtgactggcgagcgcacctccttcttcgtcggatggacgttgacatcgatgttctcctgcttgatcattaggctgggcacgtcggcatcagcatcgccgctcggcagattactccggatgacagcacgcacctgatgtagagccacggcagggtccccttcggcagcacgctgaggtagatgccttcgacggccttcttcaggcgggggacgtcaacgagccggtctggcggtgagaaaaggtcaagcgctcgtgagcgagtgaaggggaagcttgaggcgcctattgagacgtacggttgacgaaggcgacgaagcctcccgtcttgcgcgcgttgtagcccgccccgctgatccagccctcggcgctctcaagcccgagatcggagtttgacacgggcggcagaggaaggagcgccttggtgagggtcggcccgtagacgagctgaatcgtatcgaccggagacgcacgtgagggcgtcgagacgctcgggctggcgacgccggcctagaaaaagcgagggtcacatcagcaagccggccgtgcccatctcgtccagacgatagaccgcaccttcttgcagacgaatgagattgttgggttgtggacggcgtacttcgtgacgacgtcgacgatccgcgcaaactcgtccgagacgttgcgcagcgcccgccgccgggacgggacgttgaagaagaggtcctcgatctggtcgtcaataagggcaggacggggtcagagatcatcgagacgatgggcgctcgctaaggtaaggctgaccgtgatcgtcgtgcctttgttgccggcggccgacctgggctcgctcgactcgtctggctttggcgggacgagcgcgccgtcagagtagttggccctgagtgccggcggagcgcatacatccggtcagccagggcatgcaaggtttaagacacatcaccagggacacgcaccgccatgcgcaggacgcgccctcggtcatcgtcaggacggtgacgtgggcgacgtggctgatggacgcgagtgcctcgccgcggaagccgtacgtcgtcatgcgcgagaggtcgtcaaaggtccgcagcttggacgtcgtgaaacgccggcaaaggatcggcaggtcggcgtgctgttcaagcagacgaagccaagctcagatcagcccgagcatgcagccaacggcctgatgagccagcaagaggcgcccaaccgcaccctgatcccgcagccgtcgtcctgaatctggaggagcttgagcccgccgtccttgaccgtcacccggatcgacttggcaccggcgtcgagcgagttttcgatgagctccttgagcgcattggccggccgctggataatctggccaaagcaagatggtcgacgagcggcagtcagcacctggcaagtcgttcggcggtcgcgtcgcagggtcgcacctcacccgccgcgatccggttgacgacggactcgtcgagcgcgaggatgggcttgggctcaaacgcctgacggtccgcgctgtcgacgtccatcgatgtgcagccaaagcggtcaggcggcaacgatgtggcggtggtcaaagggtgtcaaggtcgagcttgccgcaagcagcagcagcagcaagggcgaggccgcgcagtcgtgcctgtccgtccttctccctcccgcctcccattttctcccgacccgacctcgtctcaacgccgccatatcgacacgtaaggtgcgcagaccttcaagtcctctgactgctccgcaacacgcttgagtgattagccagcacgggcggtgcgttgggtgccgtaccgaccagctcggctggttggacgccctatgtctccggtcgatcgcaactcgagcctcctctacgcggctgccgtgtcctggacaactgatgaggctgagctgctggcctgtgctctcgaccaagcgctgaccggtgaccgcgacctcttgccttcacgaccgactagctccccgacaacgccagccacacgggtccgccctctgcctcgacctcgcgcgcacagaccgccgcctcgctgcccgacccgccctcgctagcttccgacacgatggacgtcaagcctggcggcctgctgcagcccgctgcgggcccatccggctcgctgccaggaggaactccctcggagcaggctctggtcctgctcggccggctcaagcgcgaaatcaccgacaccttgcccaaggagaacgctgccgcctcgcccgacgaggccggcccggctcccgtcgtcctcaagtcgtgttcggcctgccggacggccaaaggtgcggctcccttgtggaaggcagagcgatggacatcccgagtgctgacccctggcgaacgctcgcctcgtagtgcgctgtaccgggacgccggtcgacgcgccctgtccgcgctgcatcgccaaacgactgccgtgcgagtttccggctcagaagaagatgggccgcaagattcgcaacacgcagacgctccggatccagagctaccagcgccagctcggccggatcgaggcgctcctccggcaggaacaggcggcatcctgcgcgagcacctcgcctggagccgcatccacctcgtcctctgcggcaacgctgccgaacgcgctgtcgccgtcggccgatcagatcgcagcctcgctcgcacctctcgagccgaccgagcacgacgagctctggagcgtgcttacgcacccgctccgccttctctcgctcgacgccgagggccatcccgaggctccagtgccggaagcagcgctcccctgggcgacgcaatccctgccggtcggcaactatgtcctcgacgccgacccagcgtacgacccagtcgcggtcggcctcctgacgatcgacgactttgcccggctccacaagctgttcatggacaactttcagatccatcaccacctgctcgactaccagcttcacacgcccctcttcgtccgccgagtctcgccgttcctcgcgacggtcctcgccctcaccgtcgccgccttctgtccgctctcgggcgacctcatcccaggtctcgagcggcacgcgacctacctctcgacccgcgtcttcctcggcggctacaagagcatcgaggtcatcacggcctactgcatctggtcgtacgtcgggcctcctcatctcgcccgcatgttcttaaagctgacgatcggatcgacgctcttgctgacacagcgcctggctcgaggcacctctccccggtggacgcgaccggacgtggcatctcctgtcgcaggccctcgcgcatgcgcaggagctccggctcgaccagccgctgcctgagggcgtcatccagcagtaccgccagcttgcgaacgacctgagtctgtcggccgacctgctcgaggccaacaagcgccgggtgcagcaaatactcttctcgctcgagctgacgtacgtctcggcccttcgttctcgccctctgtctgctcctgttgacgctttcgctgccgctccctcagcgtccagatccagcgcggcgccatccagacgatgctccccgccccaggtctcctgggcgcagcgtgcgagcagctgaacgaccccttcctcaccgcgtctgattccgccgaggacctcgacggctcgcagcggctcgccgcctacctgcacgcgagcaacctcggtattaaccagctcacggtgagtttttcatttccaagtagacaaactgccggcgggtgtgtgctgacctcaatctgctccgcgcacacagggcaaagcgctggtcgcctactacgactgctcgagttcgcgcggggacggccgctcgacgcaggaaaactacaacgagacgtggcgcgcgctcttccagtactggcagtcgcgcttcaaccggttccgtcagtcgcctgcgccccatcctctgaagcttcctactgactgttgtctctcggcactgcaggccacacgccctgcatcgtccacttcaaccggtcaatcctcctcctctcgttctcgctccggctcggcagcgcggccaccgctcaggcgatcctcgacgagtgccgtgagacggctgtcgtcgccgcgcagtatgcgctcgactggctcgcgaccgagccccgcatcggctttgcgcccaattcggtcgtcagtgacatcgcctacggcataaatgtcctcctgcgggtgagcgcctcccgctgtgtcgttgtcttgtccgagagcctgtggtgctgatcgcagacccttccgcgtcgatcgtagatgagcaaccgcgggccgcaggggccgctgttcgacccggcaacgcaggacctgtgccgccaggtcgccggcatgctggccatgattggcgccgcgcgcttcaacgggtacgtctcagccaggttgcgcgaatgtcacgactttgctccactgaccctcgtgctcctcgcttcttccgtccgctagtcggtcgctcgcgagcagctacgccgagcggatcgacggcatcctcaagacgtttgacagccctccgcacacctacccttccgagccgccctgcgtcggactcgtcaacgctggcacgccgccgtttgaccttgccaccccgtcgccggccatgggcgcaggcaactttggcccagacagcttcctctatccgagcctctttacgtcgcagagcatgccgtggctggccggcggtcaggcgcccggcggctgagcgagccgaagagcgggatgatgacacgagatgagatgacatgcagacgaccaaccgggatgacaacagaaaagagatggaagtgcgagccccttcagacgggcgcctggctcgggtgtgcgacgaacgccctagacagcgtttgaccgcaagagcttgtcgaagacgtcggcgtcgggcccgcagccaagcatgccgctcagcatgtgttcgagctgcatgcggaccgtccccatcagaccgtcagcctcgcccatcgcgatcaagacgtcgtcgtcgaggtagccgtccgagagggagggcccggccgtcagcggcggcgcgggcggcgggggagggataaagaggctgagcggaaagaatgggctgcgcgacggctcggtcgaaggtggtgggagcgagctgtgccgcgggaggaaggtgatcgactgggtaaagtagaagctgtcgtacgagaggctcgctgccgggattggcagggggatcactgcgtgtcagtagactctacaaaaaaacattggctccctcgtcgtcggacgcactgatgttgaggtagggtgacacggctatcggcttgaagggcgccgtcgcattgaggacaatgacgtagctgccaccggcacagaggcgtggtcaggcatggctcgagccatcgagcagcggtccacgaaatcccgactcaccggtcgtaccaaaagtggctttccttcttgtcgtcgaagctgtcgagcggtcgacgaggtgtcagcgactacggactgcagtactgggagctgaaggaccgacaacttggcatgcgcgaggccgatcaacacggtgtcgctcggtgttcgacgcttcttgccggtcccgcggccgcggagcgtaaccgggtggaacggcgtcgcatgatggtcggcgaccttgaagccaaccggctggaagctgtcggtcccttggatccggtccatacaggcgcgcagggtgctcggcccggccccttcctccgaagggacgtacagcttgtacggcaggaggtcgagcccggccggcgtcttgacggccgtgctggggacgaggagggactgcgggttaaaatcgtagtgaaatgcggggagcgggagcgagccgacgtggactgccggctggaagggcgagaagaagccagcccagctgtagttggcgagaaaatcagccgagagtatcgaagcgcacagacaagtctgacggacgacgcacttcttctctcgctcgtggataccatcgaaccagatctcggacccgcgctgcagctcgctagccgacttgcgcgcctcctcggcgctcggccagtcgatccgctcgagctcatctctgagcgcaggccagagcgtgcgtatgtccatgacagccatcgttcgacaggcgtcgagccggaccgtgtcgacacccacgatcatcaaaggaatgccctctggcgaccagacggcgcgggggtcttctggcccgggtgtcgcgctgcgttggtacatgcgatgcaggtcagtcaatgacaacgcagcaggctcacctcagtgagacgttagcggacgcacccccagggaaactcgcagccgggcgaggcgtcggtctgcaggtcaatcatccacgagtcggtcttctggacgatctcgacgccttccacgaggtcggcaaagtaggcgataaccctgccatcaaggtagaggtagtcagcacttgatctctacatgagccaagcagagcggcgacgacactcacgtccgacgctggatgaaggccggctcaaactcaaatatactcggcccgcgggcgaggatcgcgagctcgtactttgcgccgggcggcatgcggaggatggccggattaaaaatgatgccgttgctctcgtacttgctccggtcgggctggatcggcttgccgaagtttgacccggccgtgccgttgcggatccggtcgaacggagttgcgaagcgcgtgtacgggcagccgctgctggccaggcacgtcgtgggaccaaaggtgccgccgtaagtcgagtcaccgccggagacatccagcgacgtcgccaagtcaccagcggcagcggcgaggtatggtcgcttgacgtcatccggcgacgcaaaggacgagccgaggatgagccagacgacgcagaggaagacgccgagctgcgtgaggacaacggcgacgcgtcggttcgagaggaccgagcggaggaagacgatttgatctgcgagcgagcgcgaggccgactggctaccaaagggcagagatgatggtccgtacggaaccggcattacgggcgggagacgtgagcagctgaggcgagtgaaggaggcgcgaggcgcagtcttcggaaggggcgggccagccggcggcagaagggggagtgtgcgtggaggtacgagagatgctagcttgagcaacaggccatgcgcaacttggccggggaccgttccaggaagtctgcctgctgctgctgctgctgctgctgtcgttgcgagcaaggcgggttgagatggagggcgagagaggcaaggtcagagagctgaaacgggccgagaccgaccgtcggcccagggccgaggcggtcgttagggtgacgggctcctagcaaccgaggcgggcgcaacgacgctacgttgaggtacagcaagcttcggcaaagcagagcgatgaatggtcagagttgcagatgtctggcagcagcacgtcctgtcccgggctcggcaggaggctgcagagcagcgtcctctggctcgctgtggcggcctcgtgcaggcacctgactcgcccgccgggcccgagcgctctccgccgcgttcgcgcacgcaaggaaattcgggtcggctctcgcagccctcggacgcccaaccagctccttctttcgaccctcctccctctttcttagactctcgcccagcatggacaacctgcccgaggacctcagtcagtcgctcgcagctcaacgttccgcgctcccgcgacctcgagtgcgactgagactgacgccgtcgccctttgctgctccgcgctgcctccgctcgaccagccattcactcggcgtacgacacgatccttattctcgactttggatctcaggtgagctcttgtctcggctgtgccaggcgctcaggggatttccgactgcttcttgagcgccggtcgagtctctgggcgacctcgcgtcttgcgcccgcatgccgctgcgcgctgacggccgtctgcctcccccttcgcccagtactcgcacctgatcgcccgccgctgccgcgagttcaacatctactgcgagctcctgccctgcacgcagaagattgccgagctctcgtggaagcccaagggtgcgtcctcgctggctcgtcggcttttgcaggcccggcccgctgaccctgatcgctcgaatcgccaggtatcatcctctctggctcgccctactcggcgtacgatgccgacgcgccgcgggtcgaccccgccgtgtttgagctcggggtcccggtcatgggcatctgttacggtctgcacgtgcgtaccttcgacaggagcctcttggcaaactcgcacctgatccttctttcttcggctcatgcgactgcccgcaggagatcgcctggacctttggcggcgaggagtgcgtccaggcccacaacaagcgcgagtacggtgtcgccgacatcaacgtcgtcccgaccggctcggcttcggccgacgccctctttaagggcatcgccgaggacgcctcggtctggatgtcgcacggcgaccaggtgacggccctgccacccaactttgtcacgatcgccaagacgccgacggcgccctttgcggctatcgcgcacgagtcgcggccgatctacggcatccagttccacgccgaggtcacccactcggctaagggcaaggaggtcatcaagaactttgtcgttgacatctgccaggcccgccaggactggacgatggtgcgccggagcccattaagtacacctgctcggctgactactgatcagccttctatctcgcttgcttcaggacacctttatcgagaaggagatcctccgcatccgtaagatctgtggtgacaagggccaggtcattggagccgtatcgggcggtgtcgactcgtcggtcgcagccaagctcatgcacgaggccatcggtgaccggtccgtccccagccgcatctctcacgtccagcggtcgcctcctgacctcctttgacctccagcttccacgccatcatggtcgacaacggtgtcctccgcggcggtgaggctgcccaggtccacgagatgctcaataaggacctcggcgtcaacctgacggttgtcgacgcctcggacctcttcctctcgcgccttgaaggcgtcgaggacccggagaagaagcgcaagatcattggcaacaccttcatcgaggttttcgagaagaaggcggccgagcttgaggcgtcgttcgaggagactggctacgccggcgagaagggcaagatcgagtggctcctccagggcacgctcttcccggacgtcatcgagtcgctctcgttcaagggaccgtcggccaccatcaagacgcaccacaatgtcggcggcctgctggctgacatgaagctcaagctgattgagcccctacgcgagctcttcaagggtgcgccggctgccttgtccctcgcgttctcttcagcggccgtcactgaccccttttgcgcccctccatagacgaggtccgcaacctcggccgcctgctcaagattcctgagcacctcgtcggccgccaccccttccccgggccgggtctcgcgatccgcatcatcggccccgtcacgcgcgatcaggtcgccctcctccagaaggcggacgccatctacatcgaggagattcgggccgccggcctctacgaccagatctcgcaggcctttgccgccctactcccggtcaaggccgtcggcgtcgccggcgacaagcggacgtacgaccaagtcatcgccctccgggccgtcgccaccgacgactttatgactgccgtgcgtccctcctgctttggcctctccctcgcatctctgcgctgaccgctccatttgcacgctcaccccttaggactggttccatttcccccccgcggtccttcgcaagatctcgtcgcgcatcacgaacgaggtcgccggcatcaaccgcatcacgtacgacatcacgtccaagcccccgggcacgatcgagtggctctaaaaagggttggcggtgcgacatcactctctccttccgctcctcgccgtcgctcgctcacagcgcggcgccttagacttctcaacagaggcctcacttgtaccctcacccactcccccatcccctttcacactcttgcaatgaccccgggctatggtataaattagaaatcaaaaagcaaaggtgttcgtgggagcgtccggccgccgcgcccggtaggtggcactccttccgaggcgcagctcgctcggcgcagacccgccccggcaaagcctcgtttaatcatattggttataagtcgggcagtcaagcaggtgcagaggtcggtcataagggaggtctagtggctacaagggggcaatggggggatctgtggcttagcactgagagagaccgagcgtgcagccgggtcagcgagtcgctcaagctcagcagcgcagcctcttggaggacgtacgcagaggccacagcagaagatgcctgccaggcagccccagaaggcactagaaacgaagagaaagcggaccaggtcagaaatggtgagcttgaggctggctgctcggagacgactcacccgcaacagctcgagatacagttgcagccaccgcgcaagcgctcggcctcgccctcgaccgtctgctcttcggaagtgacgggcttagagccatcgactcgtgaactagagtctgatcctgcgagctctgcggacgaggcggaagcaagttcgaccaggagctcaacgtcagcagctcgagcgagtgcagcggttctctgcgacacagggacgtacgcatgctcggctgggcctgatacaccagcggaggcgccttgacggcgggctgggagggaaaggtcgaggaggcgacggtcatctttaaggctggcttcgggtgagggtgttggttggcgagagggtttggagtcagggctgagggccgaggttgacaggttggaatgaaggacggcgagtggtggtgagggtcagtcgagaagccttgcacacattctgctcttgaaccgttcgcttcggcagaagcggcgcatcgcctttgctggccgcgccgggcggccaagctgccatgccggctcgacgcttgctgcggcgtcgaggaggagggttcgtcaccacgccgcgccgacggacgaggccggccgacagaagtggcgtctcgtggcggcggcgcgcagccaagcgaacgaagccgaccaagtcggctctttgtgactgactacctggctgtcgagtgggctgtggaaagaccgtcaagcaactagaactagagggtcacaggggcaggttcaaagactccttgcttgcggtgtaggttgagcgacaggtgtgccagtcgcaacgcagcctcggagccagcttcccggggtaagagcagtcgatgagcaagaaagggtcatgagtcgtcagatggaaaggcaggacaagctggcacgcttcagaggagcgacagctctactcctggatgtccttggcgaggacgacgaggccgagggcgtcctggatgaggtcgcaggcagtgtcggcgagctcgtcgccggggatatcgcgcttgtcgtcccacgagcggaggtcgtgcgagccgatgcagtcgcgaacgacggtaacgccaaagccctggtgctgacctgagacagcctgtaggtcgggcaggtcaggaaagagtgtcagcgactattgagggaaagtagacaggtactagacaaagtctacacacggtcgtcacgatgcagaatctgaagaaacaagttggggatcagtctcgggaaggacgggcagagagcgtctggaataacgcactgaggctggtagccgacaagaacaatgttcttaacgcccttggcccggaggtactcgtcgaggtcggtctcgtggaagctgtcaagcagaggagtctgtcagcaacgcttggcccgagagaaggcagaaagacacagaggccggcgcacctcgagccatgggtcttggcaatgtagtgctcgtcgccctggggctcaaagccggggatgcagccgaacggagaacccttggttgactcgaccgtcgcagtcttgtcaccggtgtgagcgacccagatgacctcgctgccagcctgaggtgggtgatgagggcaatggaatcagtcgcagacccatcttggacaggcaggaggaagcacgcaccttgcggtaccgctcgacaagggcagagatgcgctcgttggtcttctcgatgccggcgactggccacatgttgtcgggcaggtagaagttctggacgtcgatgaccaccagggccgagtccttgacggagaccgtgttggcctgggagaggggagggccggcaatggagcggaagcggaaggtcgtcggggcagacatcttgaaggtggagatgggctgagatgagatgggtaggaggaagaggtggcggggaggggctgctgggcggagtgatgaggagaggcaaggagagtgccggacgacgagctcctttaagaaggacgcgccgccaccgcacccgcgcctgctgacgcaaggaaccggcgggagagtcgtagcttgtggccgacgaggctatcggacactccgggtgcgtttctctccgagtgacggcgactctctgtctctgcctccgacgacgcgtccggatgagtgagctagctcgtaagccggaggctatgagccgtctccggccgagcaacgagctgcgtccagccaggcctttggaggcgggcttgtagagaacgaggcggcaggtcggaggagttctcaagttctcggccaactccggcggcgcgggtgatccaagagcagatgcgagttcctgggctgggcagcgcagcggcggacactagtcgtgccttcgctccgagcactgcagttgacggcgacctgacgcctcgctctccccggtaccgccggtcgtaaagagtgaccttgccttcatgctgacatcgacccactatcaagactgtcgccgccgctgaccgacagaacgactctcaagagcggcctcaaaagtctgcttcagtgacaggctgccctccttgccgaccatcaccctcgacctcccctccagcacacttgctcccacctcagccaaccgaacgcatggcccctcctaattctacgcctcccagcatcgcctccgacatgactacggtcgagccagcgcctcccgccatctcaaaagagaaagaggtcgacgcaaagtcgcccgtgatcgttgccttcgcagagcacgacccaggcgacccgcgcgccttttcgcctgcgcgcaagtggttgtgcgtacaatgtttcaccccccggctctgacctgccgactaaagctacttctttccgcactccagcttcactttcggttcctccctctcgcttctttgcatttcaattgcggccaccatatactcgagcggcattgcccagatgacgaacgagtatggtgtcggccgcgaggttgttacgcttggcctctcgatctaccagctaggcttcgcggcgggcccgcttatctttgtgagtttgccaccaagacttctcctgcgctgggccgcgcctgacttgcgctgcccttcgtccaggctccactctcggagcaattcgggcggcggccagtcttcctcgtcaccttcacttgcttcgtactcttctcgctggcgacggcgctggctaagaccatcgaggccatggtcatctgccgtttcttctcgggcttctggggttcgagcgttcttgcgacctcgcctagcatcatcggcgacgtaagtactggcctgcatgggcgagtgcagttgaattcttctgaccttctgacgtccttctccagctcttcaatgcttctgaccgcggaacggccatgaacttcttcgtcatcgcagcctttggcggtccggtcatcggccccatagcaggcagttttctcgcccaagaggccgggtaccgttggatcttttggctcctgctctgctttagcggtgtgtgcctcctgatcggtgcgtcctgcttcttgcgtgatcaacgcatacggccagtcgcctgacgaatctcaacaacaggcgctactgtccctgagacttttgcgcccgtgatcctggagcacagagcggctcagcttgccaagtcaactggcctcccgcatcgctccatccacgcgcctgccgaggccaagtcgctgaaggcaacgctgctcgtctcgctcggccggcccttcgagcttctcttccgagagacgattgttgcattcttcgccatctacacggccctcatctgttcgtccgcccggccctctcgcgttgaacctccctcgttgctgacgcgcgcctcctccctcagacggcctcctctatggcttcttcggcgccttcccctacatcttccgcggtcagcgcggctggagccctggtgtcgcctcgctccctttcattggcatcggctgcgggatgctatgtggcatcggcgccaactccttcttcaacaagaggtacgttgccaaaacgaaggcagccaacggccacccactgccgcccgaggagaggctctacctctgctgcctcggagcagtcttcttcccggtcggcctcctcatcttggcgtttaccgcggacaaggacatccactggatcgcacctgtcatcgcgggagctcctttcggattcggcctcgtcgccgttttccttagtcaaacggcgagtctctatcccgtgccccctctcagcgtcgcgaatcccgtgctgaccttattttgaactaccgcagtcgtacctcctcgactcctacccgacagtagcggcctctgcgatctcttgcacagccttttcgaggagcctgaccggggccgcgttcccgctgttcatagtacagcagctcgacggcatgaccgtccgctggaccctcttcctctacgccatgattgccctcctcctaatgcctgtaccatttctcctcctgaagtacggcgttcgcctcagagcgacgtcgcgctacgcgccctctgcgccggcacctcctccggtcgagccccaacctgcaggcgtccccgtttgagcctggctgccccgctcccctacttagatgtcatgctgctatcactagaccgacgctcatgccgggagaactgcatgtagaggggtggggagagggcaagggtatctagcgagtccggaaaggaggaagggaggcaggagtttgatggcactgaggccagcgcgagggtgtataagggtgaccgaggagccgatagagggcggacaggagagagcaaagagtgtccggaggcggagagggaagaaggagcggccgcctggagcggtcaaacgaagatctcctcgtacttgagcaggatcgtctcgaccgcccggcattggaagctcatcaggtcctgcatcgacatgccctcgggcccgccgccttcgggtggctggcggaagagcgtcggcccaaagacgatggcgaggttcgaggccgacatctggttgattttctcctgctcgcggaccctgcaagaagggcaaagagggaccgtcagctcgatcgtcgccgcgggaactttcgcatgacgcacttgtggaggtgggccatgaagtacttgagcgcggcatagttggcgtctgggagctcgttgatctgctcgtgcaagcggatgtgccgcagccggtcattgtcgagccgggcggcctccatgaaggcgccgaactggctgtaggtgaagagcgggtccggcagctcgcggaaccagagcttgagcgtgctcgcaatgacgttgatgtcggcataggcgtcgtcgttctcgaggtcgacggtcgcaatgtctgcagcggatggcgagcgaggagtgcagacgtcagagagcggctcctagaaggcgcgtggagtcggacgtaccacggtcaaacgccgccttgagcttctgcacggccgacgtcatgcccgacagccggtagatgcccatcgacgtgagacctgcggcgaaggccaagcgatggtcagcagaagagccgatgaccagattagcaatgagtgagaacgcacctcgtgcctcgatcgtctcggcgcacatctcaaggatccgcggcacctcgtcgccgtcgcggaccatggcgtcggtcaggtcgaagccaaagacaacgctggcgcttggtgagccgccgccgccgggcgcgccagcgctgaccgcccccgcccccgcctgagcttgcgagttctgcacgtggggtggcagtggcggttgctgcagaggtcgaaagcgaaagaccgaagggtgctcagcgtctacctcgatggggtgtctcagcatcagcaacgggccgcacgtagccctcctcgtacaggccctctctcctggggccgcggctcgggcccgagcgggcgacgataaagttttgcatgtacgtcttgaagtcggtccggttgtcgacgctgtcgacgatggccttgagaccatgaacgcctgacagcggcgggtagggtgcaagaggagccgccggtcagggaacagtttgaggaagcattcgcgcgaaaggcgcaccttccggcgggtcaatcggtgcgatcgctccgccctcttgaacgagttgcgattcgtagaggaaagcatagcgcgagaggtgatactgcgtcgccaggtcaatctcgtccgcgcactgcttgaggagctttgacggtcggcggacgaggcggagattagcacgagacgatggacgagagcaacgcgagcgtatcagtcgtagacgtactcggagaatctttggcagctgcgagttgaagtattcttgccggacgctctgcgcctcgagcacagcctggcggaacgcgtccgacgtttgcgacatgcgcacgcgcgtctcgtcctcttgacgttgcatctgaagagccgacagtcgaccggccatccggtcagtggagggtctagactggcttttgacagatgcgccagacgcacctgcaccggattcttgttcttgaagaggccgccgccaagcttgccaaacttctttttcgcgtcgttgctgctgctgcccgagccagacccgccggctccgttttgcatcgtcgcgtccttgagcgagccaccctccttgaggatgaggattcgctccagctcctcaaccgtcgtgtcaaagcgcgacttggcctgcgacagagctcgtcggtcttgtcagcctgcggccgaatattgaacgagatctcgaaagacggaccttctccatcgccaggtcagcgtcttgtaatagccgctcgtatcgcgcgcccgtctccttgtgcatcttgcgcgccttctccatttcctttgcgagcgcgccaagctcatcggccatctcgccgaggcgggtcgcgaaccgcagccgctgctgggcaaccgtgtctgagagccggagagagtcctggtaggccttgatgaaggtcctgtgttcgaaagggaaggatctagttagcgcaaagcccagacggttggacagacgcctagtgacgatcccgtctcgaagaacggaggcgacgcaccctgccttgccctcgcttcgagaatactggtccatcaggtcacggcccatctcgccgagcgagcgcgcataaccctcctcgaccttggcacgtgctttgaggaagatcgagacctgcttgcatgaggcgagtgactgcttgatccgaccgtcgaggagcggcatcgcgcagtcgagctcgcacagctggcggaggacaccctcgtcaaactggacggggaccgcgccgttgctcccgcctccgccgacgagcgtcgtcgctgatgacggcccgggctggccaaagccaagcgcgccgaagccggcgcctagtgcggtgccgtcgagctccagcgctggcgtcggactgctcaggctcggcctaccgccaccgccgttgcttccgcctgcagattggtatgcttgggcagacgagtggaacgaagagtttgaactcggccgccgaccgtcgtctaggctcggccggccagcgccggtccgaaagctgtcggctgttgtcgccatgcttgtgatcgaggagacggacggtcgaccgggctgcgaaggatacgacgactgctgctgctgctgaggagaaggctggtagccctgatactgctgctgctgttgctgctgctgctggccgtaggagctgttcgccgagagcggtggccgttgaccgtttggcgacgaaggcattccgcccgtggctggaccatacgcgctcggaccagcaccgaaagtaggcgagtcgctcgactgcggctgctgggatgagagcgacgagggagatggctgctgctgctgctgctgggtggatggcgccgacgagttcccatacgagcctccaccgtcgccgtctgtaggcacagagtacgaaacgtaagggcgcaagcaggcggtcaacacgtggtcctttggcagaagcagcgtcacttctccgggtaaagacgaagagaagcaactggggaagaccgcgcgcagatcggtcccggcccggctgccagctcgtcgttggacccaatgtctcgcagcgaccctcacggtgcagacctggcgcatgcggcagatctggcacatgcccgaccgtggcttcccctgccccatgaacccaaaggaatgcgtgacaggtacagcctctagcgcgctctggacgctcgggcgggctgagacccagtcgctcgggcgcgcgaaggccaggtagacgacgcccggcctctgctgcccagtatttcctcctgccgcacctgcaggcacgccccgagcccgagggactcccgacgcgacccccgagcgaagataacagtgagcgcaacgtgcaggaagggactgacagtgcgtctggtcgttggttgagttgctcctgccgggcgcgccgctgaggtcgacggcggcaagctcgtcttcgatgccgcccacgccgcgcgacatagggagatcttgacgtaggagaggatagggctgctgggaagaagcgaactgataggggactgagcgaggtccgaggcgacgaccggctggttgaggttgctggctcgaccatcgctcccctcctccccttgcccggcagagacaccgcgcgcgcaggcgcggtcggagccttttttccagcgcgcgcgcgcgcacacggtcgcagcagcacagctcgtccagccgaccgacctcgcctctactaacggcgactcgcctcatcagaatgcacgcccctcgccgtgttccctatcgatcgctcgataacctcggcgccgtccaccgccaaatctatggcggacccgaggcctcgtcctccacagcaacctcgccgccgccgccgccgcccgagctcgccctctacgcctaccactcgccggcgtcggccccggtggcccttggcctgaccgccgcgcttctctcggcgctcgccctccctccatcagctggctcgcttgcaaagcggctggcgctcgcgtcagccctcgtccggctcgtcaactcgctcgtcgacccgctccagcaaggcctctacgcccggccggttgcccttctcgcggctgagcttggcctgccaggctggctagtcgagcttcgtcacgcggcgacgcacgacgacctaccctccgttgccgttctcactgaagcgggccgcgaggcgctcgcctaccttgacaacgcatactggcggccaacgctcgacccgccgacgcgtgtcgactcggccgagtcgtgggcggcacacacagctgtcctacctggtctcctcgcagcctacaagccgctcgccaagcaggtcgccagggacgcgagcacatatccgggcccgctcaaggcgagcctcgccgagctcaagacgtgggtcgctacgcctggcgacgaagcccgggcgctggccgtcctcatcgaccacctgatcgacagcgagcgcggtctgctcgtcccgctagcgaagaagtgcgtcgatctcgaccgtcttgattgtgaacgatgacgaagcttgctgacaacggcaactacgcctccaggaagcggccgacgttcacctcttcgaacccccacccgccgccgccacttctggcgacgtacactccgctcctcctgcagcttgcccgagcgcacccgaccctctttccctctctgctcgctcgccggctagcaagctcgctcgcagtggaacctaaccccgacccgtccgccgcggccgagccgaaagcgcggagccgatccgatgaagacagccgctgcgcctggctcgtctggacggtcgagtgtctcgtgccagacaacgcgaccggccaggacgcccggccggtgctcgtcggccagatcgcacgcgaggcgttcgggagcggtcggccgcttcgggcagtgttggcggcgctcgctggccgacatccggcctcgctcggtctgcagctgagggccgtcctccgcgtgctgggtgacatcagtctcgacgacgtggtcgcggcgcctgatgcggccatggccgatgccgatgataccggtctcggcgcagcagtcgcgacggacccttccaccgctccgccaccgccgagtcgagccggcgctctctctggtctcgcccctatcgcgcgtgcttcaaatattgccgccagtggggggaaagcgagactttctccgaaagcgaccgagccctgcttgccaccgtcatcagcctcagggaccgaaatggccgacgagctgcgagctgccgaggctggctggacgcgcgtacccgagcaagcgtggtctattcggccgatgggcgtccgcgtgggcgagtagcgctcgcggatggagaccagagcggcgggaacgttcgcagcacggatccatgctcggtctctgccacaacaacgagactggttgcaaacaaatatcatctctagggttgggcaacgcccgcgtacgccgacccctcgagcccgcgagagaccagcgcaaactcgttgaggccgtcccggacgcgctttgttgagcgggagccgagaacggccgcctggagcttctcgcgcgcctgaggcgtcgcctttgagtcggggtggttttgctgttagaagggcagaagatcggcgcggtcagccaggtaggttgagaaggaaaccgccagaaagaggacggacgatagagagggcctcggcgagccagacggccgagtcctcagtcagacgggtggagagcgcggcaaggagctctgccaggttcggcacgaccgaccgcggcgagtggccctcggcgccggcgatgatacggccgatcatggcccggccatgagcgcggagggccgggtcgagcgcggccgtcatgtcggtcgggctgcgcgagccccggaggaggctcgtcaagaagccggtgacggcctggagcgagtagcggtcgggcaatcgcaagccctccaccgagagaccgagcatgagaccgagcgcctcactcggtggagcgagtagcgccgcggggaaacggacggcaatagccgatgcaaacttgaagagcccctcaacaacatcgggagcggcgtgcatggcgcctgcaccggcagcaagcgcgcgcgcacccgcactaacgaggacgcccgtcgcctcgcggaccgtggcgagcgtcgccgccgggtcaatctgcgctcggcgcttagcaaggagaccagatggcgcgagtcgattgacaaacgtctcggcgagagagagccagacgccgttgacgtggtgggcggcggctgaagcaatgagtcggacgagcggctccgaatcgatagacaggatcgtcggactggccatgctcgctgacatggccttcaggaagtcggaaagctcctaagagggcgagatgggagatcagcgccagacatggcttcatggctggcgagcctgtgggtggccgactcactgctgctgtctcaaggtcagtaccccagccatgggcgacgccggtgattgcctcaagaactcgctgccggaggtgtacgatgcggtggtcggcccgcgcctgatcgagcgcgagttgagaggcgcttggcgtcccatcctcgccatcctcgtcggctgcggcaagctcggcctcgaagtcgtcggaaggcgcgaggcctttggcaatggccgtaagcgatcggagctgctggacggcaagcacacgggcctcttcgggcagttgggcggcgccgttgagcacctcaaagagcttctcgacgatcggagtcgtgatggactgtcgaggaaggacgtttgtcagcggctgaacgacagagaagtccctttgaccgagatatggggcttacgaggacgggcgcgacggcctcggccggtggcagggcctggacgacagaaacgacggcctcgagcacctttgccttctcctccggctcgatccgctcggcgatctggtcgtacaatcccgcgagcggaccgacatgccccgtcaatctgtgccggcagaggtcgcagacccgcttaaggctcttcgctgcctcgacgcaaagggccgggaccgagagggccgggacgagcagctcgaccgccccgggaacgaaggccgggtggaggtggagccaactcgcgtagtcgccgatgagactgacggctgtcaacctgacacgctgctgaccctcagatggcagccggctgaggacctcgggcgagaagacgaaaggaaggatttcggcctcgtcggtcgggacggcctcgcggacgcagcgaagggcgtggagcaccgcctcgacctcgtgccacgcgaccggttggccggcgctcgagggcccgatgagccgctcgacgagttggccgtgaaagaagccgaggagtggccggcgaaggacgtagaaggaagtgacgaggcagtcgccgagctcaaagcgatagctcttgaagcggtcgcgctggtcggcgagccagctcgcgcctccgtcggccgggagcgtcaccttgcgcaggagacggcagacgagctcgaaaaaaaccgactgagcgacctgccattcggcggacggcggctcggcatcggccgtctcgatgtgcctggccgaccgtgagagggaagcggtcagcctactgccttgaccgcttagttgcagtgttcgagggcgagaggaagtgtgaacgcacggcgaggcagtgagcgcctcctgaaagtcggaccagaacggaatgaccaggtcagagacctcctcgtcctgaccaaagtagccctggaggccggcaaagccgaggacgagcccgaggaaggcctgaacgtcgggctcggcaagtgaaagggcgaggtagtcggccgagtgctcgcctagggctgcgagcagcttgacgagcgactcgtgcggctcgtcaacgtcgccagctattaggtgggcgcgagcaatgtcagtaactttgagcaaggtggacgaggtgaggacccgaagtaagagccgactgactgctgaagcaaccgttcgcaagcgtctggcagatcggaccggcgaaccaggcgagcacaggctctgtcagcaccttggatccccgaccgtccttaaggaccgaggccgtcaggatctcgcagaggaccgaggcggaggcggcgaagacctcagggtggccgtcgggcgcgttgagtaggccgatcaaagggagaatgaaagccgtgagcgagctggagtgaggagccaagatcaatcggttgcgctggtctgactcgatcgacagaagaggaagaacgcgtactctgcgctgagggcgccggcggcgatccaggcctccaagcagttgagcccctcgacgagctcagcctcctgcgcgtccgaccgagcgccggcctgccagcggccgacgctctcgcctacgcgagcacagacgaccggttcctccctcttgagaacgtcggcgagcgcgcgcttcctcgggccgagcaggcccgagcgggcaacctcctcgggcaggatctttgcaaactcgagcgcaagcggccgggtctggtcgccgcctgcccgggcgaggaggtcaaagacggtcgacagcggctgggcaaaggcctcggcggacgagagccggatcgtgagcccggcgacggcaacgaagagcttgcggacgacgatgccgtctggtccgcccgctgcggcgctcgctgctagtcggcctgtccagtccaggatagacgcgaggagcggctcgtgctgatcggctggaagcgactccctggcgcgtataacaaagggaatgaaggggtgagcttcgaggagctcctcgacggacgcgccgtcgcctggcgcacacaccagtcgcggtgaatcttgaccgaggcggtgtgggcaccaaagaagcggacgttgccgtcctcgtggccgaggagcgggccgatgagcgcccaggcggcgtcggtccgctgggcctcgagcagctggtggttgagcgcctgctggtcggccgcgctcagcgccgcctcgggcgagtagaggacgcggatcacctgagcaaaggccgagtcagcaggcggcgcacctttcagagcagaaacgagaacatacgttgacgacgtgattgatgtcatcctgcgtgagcatcgtttggctgggcgagggtcgtcgtcgagggtgcggagagggaggaggcgaggcggccgagtgctcaaaggggctcgcgcgatgcaggacggcagggctaaacgagggcggcggcggcggcggcggcgcgtctatcgtctcgcctggccctctcgaccgtccccttccgacgccgccatcacttcccccttcactctcgcgccgacacgatgggctactacaacctgaaaggtccgtgaccgcagcgccactgtcggaggcgcccggtgctgctctcctaggcgggggggcttctcgccttgcttcgtgccgagctgacctcgcctctcgtccccgtctcatctgtagcgctcatcaaggcgatccgggcgtgcaagacgcttgccgacgagcgggcgacgatccagaaggagtcggccgccgtccggacggcgttcaaggaggacgacgcctcggcccggcacaacaatatcgccaagctgctctacatccacatgctcggctacccggcgcacttcggccagatcgagtgcctcaagctcgtcgcgagcccgcgcttcgccgacaagcggctcggctacctcgggacgatgctcctgctcgacgagaaccaggaggtgctgatgcttgtgaccaactcgctcaagaagtgcgtgccccttcctctgtcgctggggtgaggcgcgggtcgtttggcgggcgacggagctgacctgctacctcggctgccaccctccaacgctccttccgccgctcatctctctccttccgccgctctcgccctcccgctcgcacttcacagtgatatgaatcactcgaacatgtacgccgtcggcctcgccctctcgacctttgccaacattgcctcggaagagatgagccgcgacctcgtcaacgaagtcgagaagctgctcggctcctcaaacacgtacattcgcaagaaggtcagtccctagttttgcttactcacgttctcgctcttcttgcaacacacgccgtcgtcgaggcaacgtcgagcgagggtcgacgcccgcttacggctgaatctgagagctgacacccccttctctccgtcaccttccaggccgcgctctgtgccgtccggatcgttaagcgcgtgcccgatctgatcgagaacttcatgagcaaggcaaaatcgctgcttcaggaccgcaatcacggcgtcctgctcgccggcgttacgctcgtcatcgacatgtgtaacctggacccggactgccgggacgagttccgcaaggtcagtcgacagcgagtgcactttcgagaggaaggcccgagctgacatgactcttctttgccctttccgcaacaggccgtacccttgctcgtcaaacacctcaagtcgctgacgacgcagggctactcgcccgagcacgacgtcagcggcatcaccgaccctttcctccaggtcaaattgctccggctcctccgtctgcttggcaggggcgacggcaaggcttcggatgagatgaacgacatcctcgcccaggtcgcgaccaacacggatggcagcaagaatgtcggcaacgccatcctctacgagacggtcctcgccgtcctcgagattgaggccgacgagggcctgcgtgtcatggcgatcaacatcctcggcaagttcctcagcaatcgcgacaacaacatacggtgcgtccctcgacgctgcacaagtgccgctggagcttgcagactgaccgcctttccctcgcaggtacgtcgccctcaacacactcaacaaggttgttgcgatggacacgaatgcggtcctccggcaccggcagacgatcctcgcctgcctccacgacggcgacatctcgatccggcgtcgggcgctcgagctctgctacgcgctcgtcaacggccaaaacgtccggctcgtcgtcaaggagctcctcgccttcctcgaggtcgccgacaacgagtttaagctcgggctgacgaccgagctctcgctcgcggccgagcgctttgcgcccgacaagcgctggcacatcgacacagtactccgaacgctcaagctcgccggcaactttgtccgcgaggagatccttgcgagctttatccgcctcgtctgccacacgcccgagctccagacctacacggtccgcaagctctacctcagtctcggggccgacctctcgcaagagtcgctcacgctcgccgcaacttggctcattggcgaatttggcgacgtcctgctcgacggtcccgtcgacgaggccggtcgaactgtcagcgagaacgagatcgtcgacctcctgatctcggtcctgcactcgccctacaccaatggcctctcgtctcaattcgtcctgacggcgctcgtcaagctctcggcccgctttgctgagcggcccggcggggggacgcacgagattgcgcggatcgaggccgtcctccggacgtttgaccacacgcaggagcttgagcttcagcagcgggccgtcgagtacggcagtttgctcggtcttgccgaggtccggacgggcgtgctcgagcgcatgccgccgcccgagataaggcagaccatcatgggcaccgtcagcgaaaagcgctcggtcggctcaacccgttcgacaaaggacacggtgcgttccagcggcctcctgctgacagtctactgcccgagtttgccgtttgaggctgagacatccctcatcattctcaacacgcagtcggtcgtcctggacctgctcggtgatgacgttccaacagataacggtgcggccggagctggcccggctggctcggcccagcagactcaggacctcttggccgacatctttggctcgggtccgtctgtgtcggcggctggagccccgccagccatatcaggctctgctcatgccgacatcatgtcgctcttcggcggcggcggaggcgccgcggtcgcaccgacgccggccgctggcccgtcggcatcttcctctctcggcggtctcgactcgcttttctcctcgtcttcctcctcctcgtcgtcgtcgcagccgtcgcagacgtccaggccagcacctcctgcagcatcagcactgccgcctgcagcatcaggcccgactgcttacacggcctacgaccggcatgggctcaaggtgacgctcactccgcgaccgtcaccgagccagccaggcgtctaccagattctcgcaaaattcaccgcgacggctggctcgccgtgcacgggcgtcaacttccaggccgccgttccgagggtctgtcccttttgtacttgtcctgcagaaagcgcggctcgctgactactctcacgctccgcctgcctgccaacagacgcaacagctacagatgctcgccatgtcgaacgccgatatccacccgggcacgcaagagacgcagcagatgcgtgtgatggcccctgctggcgtgcgtcgccttttggaccacttttcttgcgcccttcctactcaaactgatctgcgttcctcttctgcctttccagagccagatccggctccggctccgcgtctcgttcgctcgcgatggcgagtcaatccaggaccagaccgactttgccgggttccccccggctctcacggccggaggagcgtaaggcgagcgccaaaccttgctttcgtcagttctccaactccttgtctgcgcttcggtcgcgcttcacgcacccccctccttataacttttacgacctccctcccccggatctctacatgagaacctgttttgcacgagtgtgaggtttgtcgtaaggatcgtcaataacagaatgtggagttgcgggaagtcgtgcgatgggttgaaggacagcgagaaagtgcagagagaaaggtctgtcgacggtgacgatcgaggcggacgacggccggacgtatgaagggggctcagaagagggggagtgacccgagcgaccggtactggccgacattccagtcgccaaaggtgcggtcgtcttgccgatacgcctcggcacggactgctgcggcgatctcgccgttttcgcgctcgacaattgcctgcacgagggttggaccgtcgacgatgaggccagccgtcgacgagcacgtcgtgcagatggccgcgacgagcgagctcaggatgttgcgcgccagctgggctacgtagggatcgaaggtgcgctcgtgctgaggcgaaagcgagcaagttgtgagctgcgacgaaaggagtcgtctactgttctgttagagacgtaccatgtctctgatcgtctgtggcgggtgacgggcaagggtcgactgaggctggggatcgagcggctcggccagactgggccagttgactacggctgccgctgacatcctctcgctcgcgtgagtgaggagcgacgtctcgttgtgcgcctcgaacccgcggacgatcatctggcgcgcgcgtgtggaacaggcaacgctgaagtgatctgtcgcggcgagctcgtgctcgaggtcgcgcgaccagatcgtcagattgtgaagcgcaaagacgtctgcgatcgagggtacgacgagctggaggagcgccgtcttttgcgcggcgagcgctaggcccatgtagtgctgcaacaagacgcgcgtcatcatccgtcagcgggagggtagacacacgctagatgagcgcagactcaccagaactgcactgttcgtcggcgctggtatcggaggcgaggcgggccgcgagacgggcgaaggcacgcggagcgagacccaagtcgccgagcgtcgaccgtccaaatggtcggactccgagggctgagcctgaatcaacaggggcgcgaggagatcagactcaggagcacgactatcaaggctcgttggcaaccgcgtacctcatcgacgtcgatttcgtagataagcgaggcgagccggttgttcgcatctcccgcgcgccgcttgcctttgaaagcgttgttgaccgcagccgtcgttggcgcgcgttgagcagcgatcaggctcgggtctggcggcggcgggcggaggtagaggcccatcttctcaagatcctcgacttcgtttgagctaccgtcctcgctaagaatgtcacgccgggcgccacgagcctggaaaaactcgaccgggttgccgctccgtggccgcttgttcgacatcggccccggctggggcggcagcggcccgcgcttgaaaaagatgcgcggagcggccgagacgttggcgagcgctgagcgagtcgtccggtcggcctccggttctggtgcgacaaaaggcgagcccctggacgcgcgcgacggcttgggatctccggctcgccggcggggcacgtacgacggccggaaggcgcggtcgtctgggtcgtccgactcgctcgagaagagctcttcgtcgtccgagtcctcgtcgtcgggcccgctcagtcctgacgaggcctccttgtccgctggcggcggcggtttgggcatttgcggaggcgccgggagccgcagcttgaggttgatgcgcggtcgcttctcgccgggctgaccatcggccccggtcggtgtcgacctgccagaagcgagcaaactcggccgacttgagttcggcggacgaccccgtcggacaggcgtcgctgagggatccttcttgggacgactgggcggtcgaggcagcggccggaccttgcctggcggggtcggggcgtctgatggagagagctcgttctttcgtcagtctcggctcggagacgctgaattaattcgcctggcaaggaagagctcgccagtccaggcaggccacatacctcgggctgggatgccaccgcatccgatccccagctcctggcaacgcagacagtgggcgccggggtaagggtattcgcactttcccggtttgccgtagaagcagttgtcgcacttgagtctgttggccgacgagggctgtcagctgccccaattcatgcagagctcgagccgagcatgctctacctaccttgggcgacctcggaccatggtggcgatcgtagcagacggtcgaagacggggcgaatgacggtcaggaggtcgagctcgcctttcgcctcagcaaatgacccgcgcctcgccggccgagattgtgctgacggccacgaggcaaagacaacccatcctcgcgagctcattgctgaccgtaagtaggctagagaagccagggacaccactcgtgcttcagctgcagtactgcgacttaccctaacagtacgggcggcgcagaagggaagggcggcacccgcgcagttgggctgcgatttactctttgtgcaagccacaaccttgtcagagccggccgtcgacgtcaagccaggccaaacgtgtaaccggatcgtacgatacgatgcggtcccttccgactgctcgcagatctatacaaactaaggagaggacggggaaagtgctctcggtttccacctcatcccacccctgctccgaactcgtctctcaaacccaaggcaccctcctcaaaacactcccatcgagatatgaactttgtcgtacgttgctctgcaggccaggtaaggtttactcttgcgttgactgaccttcctggcgaatcttccgtcagaaccgaaacgactcgtgccagacgtgcgttctctcggcagaccggtctcgacaaacatcagacctgacgctcctattccctttggccgctcgcagctgcggcagcaccgcctgcaactgtgccgccggccagtgcacctgcgaggccgaagcctgcaccgactcgggctgccactgaagccgcccggccgcaccctgccgcgcgtcccgagcgcgtcttcatgatccctgcttgagtagacggtcgtgatggcggaagcatcgagaagggggcagctacaaaaagtgggagacgctacaaaggtagaatgagatcagagtactcgcccgcgtccccgcgaaacgactcacctctcaggcccgccggcggaagaggagcgtgaggaggtagaagaatgcgagggcgatgactccgaacaggccgccggcggcgcccatcgcggcgagttcgccatggccggtcgcaacgagtccgaaggacgagactaccatcgccaggaggccgagcgcggccttgccagcgttcgcccggtttaccttctgctggagctgctgctccgccggaggacccttcttgccggccttctcgatcgcctcgatctccttgtgcgagagcttgacgtcggccgaggcgaggtagcggccgaggcgctcgcggttcgaggacgtcgtcacgatgacagccttcttcgcgtagacccaagcgactgcatacaagataaagaggtcaggccgatgcgcacagcaatcctgttgggcgtgagaagcagacttacggagaacctgctcggtggcaaccttgtggtcctcggcaatcttggcgatgaccgggtcgagagcgccgccgggctgagtggtgatcgggctgcaagagaagaggcaaaaggtccgtcagtgttggcgttaggaacgactagcaaagaggaggagagacaagcgcacaggagggccgagtacgcctcagcgacaatcttgtgcttggccatgtaggccaggaggtccttagttccctcgtagacgtagggcgtgaagaggatctggttgacagccggcagcgtcttggagctcttgcggaggatctcgaggtcttcaaccttgaagttcgagacgccgatctaagagaagtaggaggctcgagatcagtgaggaagccgaggagcagatttgagaaggttgcggacgccgcggacgcaccgacttgacgaggccctgctccttgagcgactccatctcagcccaagcctcggggatacgtccgacgacgagcgacgccgagtggattaggtagaggtcgaggtacctggagagaccgagataaatgatctcattcagcaagcgatcgcagaaatcaagtggcagcacgaccacgcactcgaggcccatcttctcgagcgtggccttgcacgactcggtgattgacagctgcttgtcgcctgaatgcggggggaaagtagatcggtcagctttcagaagctccacgtaacgcagatgggtctcgagaagccttaccgagccaggcgccagaccacttggacgtaaccctgaaggtgcagtaagagggttgtctgtcagctgcggccggcacgctccgacagcccggcttggccgacgcaccaaacatcctcgcgggcaaggcccgactccttgagcccggtgccgacctcctcctcgttgcggtagacctagaagcgaaagtgattttcagatcagcaagaggacaaactcagaagctgctctcatcgggtcggaacggacctgcgcggtgtcgatgtggttgaagccgacgtcgagggcctgctcgacctgatcagagacctttcagaacggcaagggcgcaaggtcagcaacagtcaatgagctcgccttacaaaagggcagtccgcaaggcgtgacacggctcgggctccttcccagctcggaggggagatggaaggtaagggtagaggggcggccggaaggagggatccgcacctgctggccattgccgagcttccagctgccaaaaccaatctcggggatgtggcggccgtcgttgaggcggatggtcgagaagggcatgatgaggatgtcacggaggagggagggtgggcggtagaggagagagcagcagtgacgagcgacgggccggcccatacgtcgacgactttcggcctgcgccgagagctcgcgatcggcaagtgcattccgccccctgacgcactcgacggcaccggtcgacaggcgcagacagagctcatcttccatcgcaagagacagtcctgagagggcagcctttccgaccttgtagcccggaggagcgttgccgaaggccgttacctctggcagaccgagctgcgtgcgcgagaggcgggtcgcgccgttgagcgcccgtcctcaagagatggcttgacccgaagggcgcaggatgaacaaacgattggtccggaggttgtccagactcttgacgaaggctgccagaggcggagggtggtccattcgaccgacgagatcgcagaggagcgagccgcggctcgacggcgggcgctgggcagattcagccctcctcgtcatcaaagctcaggaggcccttcttctccttcttaggcttcttcttctcggacggcgccccagccttgatcacaggcctgtccgagccgacggcgacggccttgcgcttggccgtctttggcgcggccgcacttggggctcccttgatcgctaccggggaggccttcgcatccggcgccgggttgcggtcgatgggtgggaggcccttggctgcgacaaagtagtgggagcgaggtcagcaaacgttacatgcatcgggcgagaccgacggcattgcgacgacgtcggtatgcaaagcaacgcacctttccgtcgctcgtcctccatctcttcgagcgttagatgcttctcctttttgagtacgacgacctgcggtgcgtcgtcaccaccttcgccccatccaaagagctcgtcgccttcgaggcactcctgctcctcgcgctcctcgctcgtctgccggccttcgcgcccgggcagggcagctctcccttcagacgcgccgtacgggtcctttgaccctggcggaggcgcacccgccagctgagcctggaacgccttgaggaacgagggcgtcctggccggcgtgtaggtcaggccaccgatcttggcccgactgcccccgcggccggcagtagctcctcctcgcccgccagagccgccgtcgtcgtcccggtcgcctcctcctccgctgccgccgccccctcggcctcgtccgcgcccgcgcccgccacgacctccgcggcctccgcggtcctcgcggtcatcgcggtcagacatgcaggaaggttgggtgaggtctggtttccgttggtgcggcggcaaaggtccgttaaggtggtctttgtcggcaaggtcactctgtctggatgggtgtcggagggtcggagggctcgcgacgaccggagccgtgaattgcctgtctgctcgctctcgcgaaacgaccaccgtctcttcttgaactcccaagcttgatggccatagctcatctggacgacggatgcagctatcgcaactttcttgtacgtccctgtctcctctcgaggtgaccgggcgagaggagaagtcgtgtcagccgctgacctcggctcggcgctgcgctcagaacgagcacctccggccgaacaagccctgcatcttcccggcctccctcgtgcaaggctggccatgctttcggagcttcgttgcaaaatccggtcaaggcccaaacatcgactacgcccacctcgccgccttgtacgagagcacctccagcttatccgagtccctcgccccccccggcgcagcagtgctcgccccggtccaccggccatcaactgcagccgagctcgagtacggctatccgccgaccgtatgtgacgagcgttctttgtccgaagtgtttgcgctctggcagtctggcgaggggaaggggctctacgtcaaggattggcacctggccctcgcggtcgaggctgctggccaggcaccgttctacgacaacacctgggccggctacacagtcgacgactggctgaacggcttctaccgcgccaagggcgaagacttccgcttcgtcgtgcgtcccggctccgttgatccgcttctcgactcgatgctgacttgggtcaaccgcagtatctcggcgcggccagcacgacgactcttctccaccgggacgtgtacggcagctactcgatctcgaccaatgtcgtaggccgcaagcgctggcatctcttcccgccggacgtcgtcgaccatctgtttcgaaacccgaccgatcgccggagcgagctcatcccagacgttcgcagtgtcgacgagcagcggttctcaggctggacaaaggcccgttccgcttgcctcgtcgtcgatcaagaggagggcgagacgatcttcgtgccttctgggtggtatcgtgagaccgaactctctggcgcaaggctcagattctcgacttcagccggagctgacatgaaccgcaacctcgcccagaccaggtcgagaaccttccctctccgcagtcgaccggcgctccttgttcgggtccgatcctctcgatcaatcataactgggcgaactcgacgacgctgctccgcatgtttgacactctctgcgccgacgtcgacgcctgcgctcggagcatcgacgacgtccgcgagatgctgcagcaagctcgcggcaccaccggatgggaggccgagtgggcccaggaggtccaagagcttgtcaaacggtgcgctggacatgctcggtcggccattgtcagactaatactgacgctctcgcgctcgcagagacgccggctggcactggctggatttctggtcattcgtcctctggggtgtcgaggtgagcgaacgccttatgacggccatctcatcctccgactgaccctcctcttcgacccagcactctttgtgccccagggcagctgccttgcagccacctctcgagtacatccgctcgcaggtttcggccatcctcgcgcagatgatggagcgtcgcgcctgggagctcgaatggctgccggaagtcctggagacgatgcagcgtgtccgcgcgacgctttcggccacctctatggatgcgacatgagcagatcttggtgtcaaggtcgcttcctgtgcacgagagaagcagcgtctcgtggcggcggcgcgcagccaagcgaacgaagccgaccaagtcggctctttgtgactgactacctggctgtcgagtgggctgtggaaagaccgtcaagcaactagaactagagggtcacaggggcaggttcaaagactccttgcttgcggtgtaggttgagcgacaggtgtgccagtcgcaacgcagcctcggagccagcttcccggggtaagagcagtcgatgagcaagaaagggtcatgagtcgtcagatggaaaggcaggacaagctggcacgcttcagaggagcgacagctctactcctggatgtccttggcgaggacgacgaggccgagggcgtcctggatgaggtcgcaggcagtgtcggcgagctcgtcgccggggatatcgcgcttgtcgtcccacgagcggaggtcgtgcgagccgatgcagtcgcgaacgacggtaacgccaaagccctggtgctgacctgagacagcctgtaggtcgggcaggtcaggaaagagtgtcagcgactattgagggaaagtagacaggtactagacaaagtctacacacggtcgtcacgatgcagaatctgaagaaacaagttggggatcagtctcgggaaggacgggcagagagcgtctggaataacgcactgaggctggtagccgacaagaacaatgttcttaacgcccttggcccggaggtactcgtcgaggtcggtctcgtggaagctgtcaagcagaggagtctgtcagcaacgcttggcccgagagaaggcagaaagacacagaggccggcgcacctcgagccatgggtcttggcaatgtagtgctcgtcgccctggggctcaaagccggggatgcagccgaacggagaacccttggttgactcgaccgtcgcagtcttgtcaccggtgtgagcgacccagatgacctcgctgccagcctgaggtgggtgatgagggcaatggaatcagtcgcagacccatcttggacaggcaggaggaagcacgcaccttgcggtaccgctcgacaagggcagagatgcgctcgttggtcttctcgatgccggcgactggccacatgttgtcgggcaggtagaagttctggacgtcgatgaccaccagggccgagttcttgacggagaccgtgttggcctgggagaggggagggccggcaatggagcggaagcggaaggtcgtcggggcagacatcttgaaggtggagatgggctgagatgagatgggtaggaggaagaggtggcggggaggggctgctgggcggagtgatgaggagaggcaaggagagaacgccagcaggcgacgccctgccttatataggttgcgctccactcagccaagcgcgccctgaccttctctggggcgagccggtcggacactcaagctgggtttctacccgagtcgtgtcagcaggcggcgagtttgtatgttcgcgctccgaggtgagtgagcatgtagggcataagctgcgaggtctctgacggagcagcggctgcgtcaagaccgttcaagccggctgtaggcgacgaggcacgctgttgatgggagcaggagcggtgccgttccttctctctgcctccgactgggcgagacggcgaagcccgcatgtctggcccgattgggctcggtgacccccgcctctgggcgtgcctgtgcccctgagcggttcgcagcgcggtcgcctgcttgacttgccagcctcaccctccgaccctgcatgcaccgtcgcctggcccggacgctcctccctaccctcctcgcacgtcctagctctgcagcgccagtcatccgattagccagtccagctcggaataaccagcagcgctccatgtccgaccctgccaccgctgcccccgcggcgcccgccgccggcgaggcgccgaccaagagtgcccgtccgtcccttgcttctttgactctcctgatcgccttgtcagaggcttctcgctaacagcaagtctgggctacgtcatcctacagtcaagaaggccgccaaggccgccgagaaagccgccgcaaaagccgcaaagggccccgtcgcaccgaagcaggcccgtggcgagcccaagaaggagaaggaggtcaaggccaaggagcccgagcaggagccctacgtcaacacgacgcccaagggcgacaagaagggtgcgtccgagctctatcaggggctgtctgggaggctcgagttgctggcgaacccgctgggtcgagcttcagacgctgcgagctcgcaagcctcgtgctgactgcctgcctgcctcggcctcctccgtcagacatgtcggaggatatggcggcctcgtacaacccgcttgccgtcgagtcggcctggtacgactggtgggagaaggagaacatgttcaagcccaagtttgaggccgacggctccgtctcgcctaaaggcactttcgtcatcccgatcccgccgcccaacgtcactggcgcgctgcacatcggacacgccctgactgtcgccatccaggactgcctcgtccggtggtgcgtatcgcaagtggttgctgactacagcccgggagcattgtagctgaccaggctcatgcttgcctcaggcaccgcatgaagggattcaccgttctgtatgcgcccggctacgaccacgccggaatctcgacgcagtcggtcgtcgagaagcggctctggaagacggagaagctcaccaagcatgacctcgggcgcgaaaagttccttggccgcgtctgggagtggaaggacgagtcagtgccggcgccttttgctcgaggtcccataaagactgcctgccgctcacgatcatcgctctcgcaggtaccaggagaagatctcgaaccagctccggcggctcggtgcctcgtacgactggagccgcacggcctttactctgtccgacgtacgtctgcctgcgtgtgccgcatggcccggccatcactgacggcgacctcgcccgcccccttctctagaagcataccaaggccgtcaacgaggccttctgcaagttctttgaagacggccttatctatcgcgagaaccggctctgcaactggtgtgtcgccatgaacacgacactctccaacctcgaggtgcggcccgcaacccttccttagattccgatctgcacagcgtgctgtgctaaccctgcctcctcaccatactcgttcgcatcttcgcaggtcgaccagaagcagcttaccggccggacgctgctcaacgtccctggctacgacctgaaggaaaagtttgagttcggagccatcacctcgtttgcgtaccagatcgagggctcggacgagaagatcattgttgcgaccactcggcctgagacgatgctcggcgacactgctgtcgccgtccacccggacgacgcccgctacacggtcagttctcttccttgagagatggggattgcctgctttgctctcagttgacgtcgtgtccgatctgcctcttcgacagcacctccatggcaagtttgtcgtccaccccttcattcccgagcgccggatcccgatcgtctgcgacccgatcaccgtcgacatggccttcggcacaggtgccgtcaagatcacgcccgcgcacgacgccaacgattacgagtgcggcaagcggcacaacctcgagttcatcaacatcctcaacgacgacggcacgctcaacgccaacgccggcgagcagttcaagggcatgaagcgcttccacgcccgtgtcgccgtcctaaaggcgctcgaggagcggggcgactacatcgagaccaaggacaacccgatgacgatcccgatttgctccaagtcgggcgacgtgatcgagtcggtcctccggccgcagtggtgggtcaactgcaagccgctcgccgcagaggccatcaaagtacgtctcgtctgtctcggccagacgatcgcgttgagcgctcaactgaccccgcaacgctttcacccgcagcgcacgcgtgccggcgagatgaagattacgccgcagcagtccgaggacgagtggtatcggtggatggagaacatgcaggactggtgcatctcgcgccagctctggtggggccaccgctgcccggcgtacctcgtcaagattgagggcgagtcgcccgacgtacgtccgctcgacgctgcctgcctctcgaaccgcttgtgatgtgcatttcgctgactgtttgcgccgctccttgtcctcgcaggctgccgacaatgccaactgggtcgtcggccggaccgaggaggaggccagggagcgggccgagaagctcgccaacggccggccctacgccatcagccaggacgacgacgtcctcgacacgtggttctcgtccggtctctggccatttgccatcatgggctggcccgacaagacggacgacctaaaaaacttttacccggcctcggtcctcgagactggctgggacatcctatttttctgggtcgcccgcatggtcttctttggcacccagctcacggacacgatgccgttcaaggaggtgctatgccacgccatgatccgcgacgcccacggccgcaagatgtccaagtctctcggcaacgtcatcaacccgatcgacgtcatggagggcatcacgctcgacgacctccaggcccagttgctcggcggcaacctcgacgagcgcgaggtcgtcaaggcccagcagggccagcagaaggacttccctaagggcatcccccagtgcggaaccgacgccctccgctttgccctctgcaactactctggcggcggccgcgacatcaatctcgacatcacccgcgtcgagggctaccgcaagttctgcaacaagctctggaacgcgatccgctttgcgatgctcaagctcgaccccgactttgtcccggcgccgacgagcgctcggtccggcaacgagtcggtcgttgagcgctggatcctccacaagctcaacagcgcgacggccgaggtcgagcgccagcttgaggaccggaacttcatgaatgcgaccggcgccctctggaacttctggctttacgagttctgcgacgtcttcatcgaggcctcgaagccgatgacggacgagtcggccacggccgggacccggcagtcagtccagcagacgctctttacctgcctcgactctggtctccggctcctgcaccctttcatgccctacgtcaccgaggagctttggcagcggctcccccgccggtcgaccgagacggcccagtcaatctcgatggcctccttccccgaggcgtccgacgcagccgccgaggccgaggccgaggctgcctttgacctcgtcttcctctcgaccaaggcctcgcgctcgctcgccgtccagtacggcatccagtcgggcctgcagagtgcgtccctgtccatttcgcctctcgcaagtgtgaagctcgctgaccactctgctcccgactgtcgttcttcccttgctccagtcttcgtgcacgccaacgacgacaagacgttcgagatgttccagcagcaggtcgccgtcatctcgtcgctgacgaagggctgcaagtcggccgaggttgtccggacggcggccgaggtccccgagggctgcgcctcgcagatcatcacgcccgaggtcgccatcaacatcatggtccgcggcaagattgacattgacgcagaagttagcaaaatccagaagaaggtcgaccacatccagggctcggccgagaagctcaagacgctccaggcgtccaacagcaagctgccggccgaggttcaggccgccaacgtcgagaaggtgcggccccctgtttcttctgtttcgtcaagcgtctgctaactgctcgtctctttaacctcagctccgcctaatggaggccgaaattgagacgctctcgcgctcgatgaattcgtttctccagctcaagtagatggtccagtgcaaagatataaagatgctctcatcgtccaaacggccccctttgcggcagggacgcccccgcatatagtcagtcgagcaagcgagcttcggtgcgcaattatgtacagtgcgatgcggtccggacggagccagagtagaaatcgcgaggctgcccactacgccctgccctctgcgccggcggtcaatgctcattgtccgccccatcctgaagggtctgactgaccgaacggctcgagaagtgcgaagggtcatgagggtcgtcagggagaaaagggtcgtacagccaaaagtcaggcttggtcgagatgctgatcagcgcgctagaagtcgaatgattccgcgcctaaaccatgattgaacaaacgaaagcaagagattgtcagctcagagtcagggacgcaggccacgtcggacgagggactgaccgcgcttcttctcgcgcgtctggcgcatgaggcccgcgcagtgctgatcgagcatgtcgacatacggcttaagacttgtctgccgccagtctgtaagtagcaagcgtgcgtcagccgtcagcatgcggtgcggcgagatcagaccgtcagcgccataggaccacgcaccgactgcctcgcgcttgatgtcctcctgcgagccttctgcggacgggctggccgcctgggccgccgcggcctcattgagctcgcggatgagcttgccgaccgtcggtaccgagtttgggtcaaagtcgtacaccagctttgggtcaacgggcacgcagacacggtctgaaggtgacgggcgcagggcaggcagtcagccgacctgcaacaaaccaaggctagcccctctttcgtcgaaaggcgacgcactcgttcccgggtggacgacaaaagggctcttgagcaaatggttgcggtgcttcgagacgtccgcgtcgagccgggggtaggtgtattggaggatgatctccttgagggcgacttcgcactgggccttgcgctggctggtcagcttgctgtccgtcgccttcttggtgagctggatccagcgttggcgcgaggtaaactccttgccagccgaccacagctcgcggagctcagtcgtgatgactgtcgaaggacgagaaggtcagctcgaggtcaacgacctgctgcactacactcggacggaccatggtcggggaacagtgtgagcaacgtctcccactgatccttcgtcttaaagcactcctggtcgtcgaggatcaggtccgggaacgttgggcccaggaccttgtaggccgccctgtgtgaaccgccggcaatcgaagctctgtcagcccaagaggccggagagcgaccggctcgtccctgattgcgtcgcacgcactctatcgatgggtgcagcgtcgtcgacttgccccagcgaacgttgaccttctttgtcatctccttgccacccttgatgacctcgaggtaggtgatgatggccttgcgctgatcgtcggttaagtcaagcgcatccgagtctgaaatccagcagtggatgcctcgtcggccggagtagacccagagaagatgcttgtaaccgaactgctctgggtgatcgaagggagggggcacgtctagtcagaggcagcatggggccggaggcgagcgacaagaaggcgcacctcggaggccgatgtcgagcacctcggtcgcgcaggcgatgaagccccagcagcgacggcacatggccttgtccgagcagcacgtacggatctcgtcgtagtcggtcatgtcgatatcgaagacgagctcgcgcctgaccggctgcagcgcactcgggcggagcgtcttcttgtccctgggctggagtagacagacgcggggcagcaaggtaagcagcgatcagctggcgagctcgcagttgcctcgtcgagctgagcgcgtttgaggaaggacttaccctcgcagaatagatggcgccaatctcgaaacgagacgggttaagccggaggacctccttcctcatctcgtcgctgttggcgaacgagttgtagcggaggtagacatcgccggcgagcgtgaaggcgaactcgcggtgggtaaagagccgcgtcggcactggaccggcaaagggtggaccagcgtcagctttgagtaagcccgtggcgtcggactggcaccgagaccagacagaccatgctcgtggttcaaccaggtgaagagctgcttccaagggaagagccggttgtagaacgtcttcatgacttctgggttggacgcgtcggcatcggcgtcgctcgtgtggctgtccatcacgctgcacggaagccaggtgccgtcagcaaacgagagcgtcgcgcgagggagcagcggacgcaagagatctcacctcgtcggaatggccatactcagaatcaggaaggaaggaggggtttgaggctgaggcgaaaggtcggctggcaggggcgaaatgaggtcgaagacgcgacgtgccgaagggagattcgcctccgagctcgacagacgctcgtcgcccccctttgctccctccgaccgaccagcacccatgtccgacctctctgctactgccaaggcagctgcgaacggcctcccagcccggccgtcagatcaagcctcggccggcagcctccgcggcaccaagttgggtcctgaacgacggtgtggcggcgcgactccgaccgcagcagcagcagcgctcggtggcacgcgcgacgacggcggcagcggccgggccttcttccccgtacccgaagccgacagcggcgatggacccaaggccgagctgagcgaggccgagatgtacctgctttcggttcggtgcgtcctgagcgtttgttgttgtacgagggggccttctctgacgttcgcagccccccttgatcacgaccgacgacgtccaggcagcagcatgccaccctcccggcatttacgaaggtcctcaacccttactctcggcccatgacgccgaccgcctttggttctgcttcggccgaaactccaccggcgtcgagctctggggccgcatcgactcccacggtcgcgcccgtcctcgcttcgggctcgactgcacccggtcgacatccgttccagccaaccgacgcctggcgcaaaacattcctcgaccactttcttgatctgcgcgctgtgagtgcaagtggggtcccgcgggtctcggctcctactgaactactgcttgcccgaccatcagaacctcgtccacgacgaggcccaacccgagcctgcgcacgtcgctcagcgcatccccgagcgttacctgcccgtccccaggaatggcgactgccggggttggcgccaatacatgatcggcgccaaaaggcggcggctggatggcggcgagttttctcagctgttgctgaccgcgccggtcactccgcttcctgcgcccaccgaggtaaagagcatggtcgtcgacgatgatgcagcttccaatgcagctgccggcagctcgtcctccgttacgggcgaccgcaacctggtggtctctcagtccgacgtcgacgcctcaaccactagatccgccgacgtgctccaaccgtccgcgcacgacgaggaagaggaagccatgaatgacaactttggcacggacgacgaagaagcagccatgaacgacggtgacgactacgatgcgtacgacgacgacggctctgtaccgatgaccgctgaggaggcctttgacgccttcgagtttggcgattggtacgaccccgcaggcgaggacgggagcgacggcgcatccggaggcgcgaacgcaaccaaggcgacggccaaagacgacgacgcagacgacgacgacgagctcagtgaggcaggaattgacgaggcggagctcgagccgctcgagccgcgccatgtcggccgcgagccttcgctcagcctgattcaaggcttctcagatgtgagtgctcttcagaccgacccaacgcctcttgatcaactactaaccgcttcagtttttcctcaatcagaaaacgacactggccgtcctcaagcacatcacgacgctcgtcgtaacgccttcgacgccgtcgctcgcgccaggcctcgcccgctgggcgtttgccctcctcgctcatctcgatccgacggcgggcctgctgacaggcgagcagacatcgcacctccgctcgctcgcccgggcctgtctcgccgtcatcgaggcgcacgccgaggcgctcgtcgccgacggcgaccgagcccgctggctcggccctgtcaaggtcgaggagcgtatgggctgctggatgatctgggccgccgtcgtcggcgtctgggcgcagcgcgacctcgaggacgagttggccaaagtattcgcgaagaatcggatcgcatgagaaccttcctgcttgcgtttggagttttacaatagcagacgtggcgtgaagcgacgaggggatttggaggcagcgaggtagagcaaaagggcagcgaatgagggtagctcacgccgctgtaggagcgggcgaggggtagatgcaggaggcggagcgcgaaagaaaggagaaaggacgagcatgcacggaaacggatgagacaaggcctgaagtagaaagagttcgggacgaagaaacgagcggggcgtagaggtgcttgggtcttgagaccggagacaaagccgaatcccgggcggccggttgtgcggccgccatttgtgaggtcgaggcgtcgacaggtgattagacgggcggaacagagccctcgcgccggccgagcaggctcaggttggaacctgcttgcttgcggatgctagaaagagaaacatcggcagggttagctcaagagacaagtcagaagtgaaggagggttgggcgacgcaccggctggcaaagttgcggctgccgagctcgtcgggaacgctgggcgggccgatcggctgccgaaggacagtcacggtgccattgctggccggagcggccgtctgctgaggctgctgctgcggagccggctgacgtccgtacgggtcactcgtgatgcgctggagcggcggaccgggcgacgcgtcgcgcgagcggccaccggcgctcaagagctgagcggcagccgacatcgactgcgtccggtcgacaggcgcggccgaggcgctgttggcagcgggccggcccatgccgagtccttcgtagatcggccgaagcgggtcggcttgagcggcattccgtgcgctggcattggaggcagcgtagccgcccttgtcgctagacgcaggcgagcgcaggtcggcatgcgtgtcgaatggcgccgccttctcagaccggccatcaaagggcgcttgctgctgctgctgctgctgctgcgcaaacgcaaagcgcgacgcgccgttgcttgagtgcggccggccgctggccaactgaggctgttgctgctgctgctgctgggcgagcggggccgtcggctgggcgttttgctgccacggcgaggttgggccgccattattggaagtctggccgccgccccagatggacgcggccgcgctgacctggtgcggaggggggagctcgtctggccggcccagacggacatcgcgctgctgctgctgctgctgctggccggcgtttggcgagtcggaccggccgccaaggaagccgccgggctgatgcatcgcagagagcgggctggccatccggggcacgcccgatccaccgaaccggtcggatccagccgggctgaggtggcccgactgagggccgctcgcacgaggatcggcagggtaggcaccgccggctccgccaccggccatcgtcgtccggccgagctgagcggccagctcgttgacatcactcgactcgaagccaaagcgcgagccgttgccacctggcggagggagcggaggcgcgccgccaccgccagccgagcgcgcgcggaggttggcctggatctgctgctgagccgcatgccgctgctcgtacgccgacgcgagctgctgagggttggcctgctgctgctgctgttgagcatgagcgcgcagttgagcctggtagagcgcctgcgcctgcgcctgagcatgcgactgctgagcgtaggcggccgcgggatcgtaccggccgccgccgttcgtgggcgagttcgagtagccccgcgagggcgggttgccatatggctgctcagcaagaagcgcagcctgacgggcctgcgcgatcaactgctgctggaggttctgcgcttgctgtcgagattgaggggattgctgatgagagtcagctacagatcatgcgaggcggcacagacgccgcggacgcacctggatcttcaacagctgttccatttgggcctcgacctcgcgctgctgctgctgggcctggagcgcctggaggatctgaagctcgctcatgccgcggccgttctgctggtggtggccgccctgctgctgggcgagctgaagcgcgacccggagaagctcctgctgctgtcgctcctgctggagctgacggtcgagctgctgctgctgctggtagggtccgtcgtggccgcggcccgggccgccaccgtacgactgctgctgctgctgctgctgcgactgctgcgggccgccggcgaccccgctggcactcgcacggccgctgcgagcaccggctccgaacggatagacgccagcgttgagagcagccatcttcgcgaccatctcctcgtcctcgtcgtcgtcgtcaaagctcgggccgagcgtgtgctcgcttgacgggtaccgctgctggcgctgaggaacgtgtggcggcagacgcgggccagccgagctgccgccactggtcgaggtcgctgaggctcgacgcgagccgtcttgctggaccgggtagccaccttggctgccgttgttgccgtacatgttgttcggcgagggcgacgtgcggaggttggcgagcagcgctgcgcgcgattggttaggcgagatgctgagaggcgggtaggacatgaccgtcgtacgagatgcgctcagggttggtggataggaatccgccgctcgatagagtgccgaggccgggtgatgatcagaaagaggtcgttcgatggcgtgcgcgaatctggtattgtcggcgagaggtctgtccgacagcagacataatgtcagctggctgtcatatcaagaagagcaagcgaagcgacgactgactgttcgttcgtgatggattgtcaaggagtcaaagtgtgcgggcccaagcagacgaatggcgaagtcgggaagtcgaaggtttaaggttgaacgtgtgggaggcttctcgagttgttgaaggagctggacgatgggccgggagagtagtagtcgcgaggtcgacaaggtagacagtggaaaggagtaggcttgaggtcttgtctgcaggtcagcgaggagtgagcatggcatcaacgagctgcttggtgaaggctctcgtcgcttgtccgcctctcgcgagctgacgtcggcgagcgcacctcgagacgaaagaagtcgcgcttttgtttgtgcggtcggagaagaggacgtaagggcgagctctggaccggctgctgcggagaagcctgagggtcgaccggtgcgtcgggcgagggtcgagctgaagggccggagcgaagggcgggctttttgaagggcgagaacagagagcggtcgcgagatgggcggcgggcggtttacaacggagtgttttgtgcttggatgaagggcgaccggcgacgagcagtgaagactggaaagcgagctggtcttcgactcttgagaaccgccgaccgggagagaagaaggaggagcgagaacggaggaggagagcgaagggcaggaggagcgaccgaaggcggagcttgccagagcacgcggccgagagttacggccaatcacgccgcgggtgcgcagtaggcaccgtaagctctcgcccagcgagctcgtccgcccgacgccctcgaacgaccagcaggtcgactgccacagctgctccccgcccagagacgccaggtcaacgtcgggaagagctctgcttaccttttcagagctgatgctgttctcgtccgttagactcgcagtcagcgcctcctctccagcttgcgcctccggcaggagctgatctcgccaggtccggccgtcgacccaccgctggcttgcgtacctcgacaaaggcgacgagcatgggcgacgaaaccttggaggccgtcgggctgctcaagcttcgttcgtcaccgacgctgtcagcactggcaggcacagccgatcaggtcggtcgcggccggctctcttctacatctccgcaggcgggcccgaggcaggtcagcgacgtccccgccgggcgccctccctccttcaaagccgattcttcgctggcgagagctgctcttcgacctggacctgacgatcagctattgtctctcgcaaccaggcttcgctcgactcgcttctccagcatgcccctcatctcttcctcgacccagcggtcggcctcgcccttacgccggtccgagctgcctctttcaccccttcttcctccatcgagcttgcggccatccctctcaagccgctcttcggtctcgcggcttactcctcttcacccgcaatccctctcgcccacccggcctcggtctccgtcgcacgaccggccgcacgcatcttcgctggcctccgcacctcttttcacccggcgtcagactgctgatccgacatcacaatgccgtcctgcccttctgacggaggcatctcgaggcagccagtccaaccccccctccaatcgcagacgtcggcccgagcgagacgccttcacgctcgaggtgcgcgtcggccgcttcatcttccggccagacgacgtcctcggccggggaagcttcgggaccgtttatgccggcctagaggaggcaacccgccggccagtcgcgatcaagcttgagccgtaagtcggcccatgtcatcgcttcttcggatcgctgactgaccgacctgggttgagggctcacaggatggcaggcgcacccgggcgctcgcatctggccaacgaggtcgccgctgtccacaagctgtcgggagccgaagggatgcctcggtcggtatggccgtgtctttttcctcttcacgaccggtttccaacgagcttgacctgcccctgccgtgacgcagcttcagaggttggtcggtcgtcaccatcccacgcacaacgcctctgtcggcctcggcgcccgtcacaccgcacagctcacgctcgtcgaccccgacggacagtgcgcgatgggccgagtgcgtaatgctcgttaccgaccggctcggtccgagcctcgacgcgcttgttggcagccgccgagggcagcggctgtcgtttgagatggtgattcgcatcgcaatccaactcatcgaccgggtcgagactgtccacaaccgaggcttcatccaccgagacatcaagccgtgaattgtatctgtctggcttccctcgcctgacacctcgagctgaaccccgcatgcgctgctgcttcgcctcagtgagaacatcctcatcggcctcgcgccgcaagacgccggcaagctctttctcgtcgactttggcctcgcacagtcattcaagacgagcctcggctatcatgtcgaccaggggctgagtggcatggccggtactcgtcagtctgatgcggaccaactgttgcatcgcgtctcgctggtcgctgatctactcgactttctcatgtctcagatatgttcatatcgcgcagtgcctcgcgcggcatccagtcctcgaggcgcgagtgcggccctttgacagtcttttgacgtctccagattgctgaccagcggtgccctcacgtctcacgtcagtgacctcgagtccatcggctttatcatcctctggctgctaggagccctcccctgggccggcctgactcgccatctcgacgtcgctttcggccctggcggagcgcactcctcgacagtcgctgccgacgccgtccagcgcatcgaggaggccaaagagcggacgatccgccgactcgctgaggttcatcgccgaggcgagggcactcatcggcgcgaatccagccaggccgaagccactctcggcggctactttgcgctcctcggccggcttcgtttcgccgaccggccagactacaagtgcgtcctttcgctgcgagtttgccgaccatcgatctgaccatttcctcccgctcccttcagcgcgatgagacaagccttcgtccgtgccgccctcgctcacggcctcgacccgtctggaccagtcgtcttctgagctaacctgtggtctgccggacgtgccctggtgctcgatggtcatcgccgggcggacattggcccatctctaccgcactgagtcgatcaggaagatgatcatccatgctgctcagcgagacgaacgagtgcatgatggtccggcagaagcaaagtccagctccaagatctgcacctgatggtcccgtcctgaggaagtagcggcagaagcccgtcagccctagccgcccttgccagatcacgcgaagttcacgactgacactctggtggaggcggagccagcggcgggggcagtggcggcagctccccttgagactcggctggctgcgaattcacatgcccttttttggctctcggcctgcgcttctgcttgtcggccttcttcttccggggcaggagcatctcgtccaaggggagcatcggcggccggctgatgggcggcggcgatcggtctgtaggttcggagtaggtcagtacgtcggacgcgtggcgagtagaaggcggtcggaagaagcgtgctgcgcacattgaagagcgggcgagggttcgtagaggtcggccagccgctcgagcgtacgccgcttgacgtcctccgggatctgcagcatctgcatcgcatggacgaccctaacccagtcgccctcctcgcgccggcgctcttttgcccgctgcattgagcgcttctcctcggacgagccgcctacggccgatgtcgcgtccgccaccgcgaggagcgcgccgtcgaggaacgcgagcgaggcggcgacgagcgggccgacatgaggcgggagcacctctgactgcggctcaagcgtgcgaaggtgaccgttggcgatggccaggatctcgtccggcaggctgaaggtcggcggcggcggcagctgcgagacgtggaccgggaacaaggtgaactggctcgtcggatggaccttcgggagcagtgccgagggcccgctggatgagacgctcggaccaaggacccgcataggcagcggcgcctcgtcctcggcgtccgagtcgatgtccatgccgccggggtcctccttggacacgaccggctcggcagcttgggcgtcgtctggccggtcgaccggctctggccgagcgagcgtcgagagcaggcctgcgcggagcgagcgcgtgtgcgcgtgcttgagcgacgccagcaggtgcttgtggtctcggatctcgttccggttggagacgctagtctggtgcgccatcctggctgctacccggccacgaacttcctactgggaggaaaaagaggagctgcgaatgatggacgttgggagggccggcacgagtgccttgcctccgttgcgtttcggctcgaacgccgtcgcctccgacgttcagcagcatctcgcccttcctcctcgcctcggcttttcgtgaccttaactgcacatagctcgtccattggttgcagcccgagatggaccgctgggctcccctccagccatccaagccgggcgggtcgtcctcgtcgggcggcgtcggctcgctctcgtccatcttgcgcgcgacctcgctcgcgcccgcctctctctcggcgaacggcggaggctcgggcaatctgcaaccgatccgcctgccgccgccacggctgggcgcttggatcgggcctctaccagagagtctgcatctgctcatcatcgccaatttgcccgtcccggactgtgcgcggctggcgcgcgtcagtcggggcttcggccggctcgtcagctcggacgccgcctgggagggtcgctggaaggcgctcggcatccccgatgccgaggctgatggaacattaggtgcgtgaggctgaagacgttctccctggaagataggaagccgaccgatggtccctcctaacagcgaacggtacgcggccgacgcgctcgagctcgaatgctggtagcggcgccaaggacgcgtcgcccggcggacccagcccgacaaccatcgcgcgaacaccgccgagcgggacgtcagcgctgcctaccgaggacgactttggcgactttgtcgacgtcccgataccgccaccggcaaacgccgctccggccgtcagcctgatggactttgacagcattccgctgccgtctcggttcggctcggctgctgcgggcgggcggaaggagggcttcttcgcgttctcaccggtcaaggacccggcgccgtcgacgagcagccattacctcccaacggcttcgctgtacaaggtagcgggcaagaacgtgccttatctggccaagtacaaggcgcaccacgtcttccagcttgcgatcctttcgccggtcctctactcggcgacccaaccggcgccgtcccagatcctgtcgatgctcttccccggcaacatgagttccgagcccgccaagcaggcagccgttctcctcacgcttcttcgcttcttgtcgctcgcgatcgcaccgctgtccgagtggtgggcggcccgtcaactcgtcttgcaggctgcagaccggttcgacgcactctgcctcacctacttctcgcgcgccgatgaggaaaacgacgaagactcgatgcgcgcatgggccgaggccggctggtccgtctggcaggaggccagctcaggcacgaagggccggctgcgcatcgaggagtgggagctcggccggacgtggatcgagcgccgcgagatcctctacgagattggcggcggcggcacctgggatccaataaagaacatcatgtgcgtcgcgcagaccatcctcagggtccgagatttttatctgacgcttgactttgcttgctgtagggcgccacctgaagtgccggcggtccagctcaacttcaccccgatggacgccttcgtcacgcacgtcctgacgtcgctcgccacctcgggtgcccttgcgacacgagtcttccctccatcggcttgcgtcctccagcaattcaccgagcgcgtcgtcagcgaagtcatcggcgaggcctacgtccagccgctgctctctcgagcacgagacgtcggcgctcgcagcggcaagggcggcgtgcaggatttgtttttgcgcgcgagtgcagcagtctttgcgatggtcagccgcgtcgtcgagatcgtcgtcgaagccggacgaaaggaggacgccgagggcaagaagatcggcccgagcgtcgtcggcaagggcgagattgagcagctgctgtcagtctttcttcaccgaaacgacgccgaaggtctgctgatcccgggctggccgtgtcgcagattcgcaatgttcgagttcaacatggacgagtacctcgacgaggagactgagtttgtcaagcactcgatgaacggcatctgtcgagagtgggacattcgggttcgtcatttctcgccagtccttgctgatccgagctgatgaccgctgctctggcctatacgcagctcaagattgactcgtcaaaacctatcccgtctgcgaatggcgcgaacggcaaggctggcgctcaaccggcgacctttctcgcctcgcaaaacccagatcagatcaagcgcaacgtactgtcctcgttcaaggacgcgctgctgctccccgtcaccattatccctcggactgccgtttacgtcgttaccgctggatcgaccgctgccgtcagcggcttttcgatgcttaatcccaacaagtggaccggctcgggcgcggtcacgccggcagccgcctcaactgctgcgactggtagtggcacatacggcaagagcagcgagaaggtcgacaacgcgatggtctttgaactcggggacgacgaggacgagacacatagctcgacacgtacgtccaacgtctcgcttcacttcctctccgattcgagcagtcaacttatatctcctggttcctgctctagacgtcgccgttccgaccgccgtcatcgccgaaaaggcgcagtctgcgctcgcaccaccctttgcgccagcttcgaccgccccctcgcgctcgacaacgcctcgacccgagtcgcagtcgttcgagtcgctacagctgctcatttcgctcgatgtcgccctcgagctcattcagagcgatcgcgaggcgctcaagcgcgtcgagacgtttgcgctttaccctggtcgagtcggcagtcgcgtcaaggagacgatcgaagaggtcttcatcctgcttctgcaggcgctcagcaatcggcacattgcccccggctttcgaatcgccaccgagcagatgcggacctacaagccggccgagcacgaggaggcgacgagcgtcgcgcccttgctccaattcttcgagcttgtccacatcggcgacacaatccagtcgatggtccaggtctactttgacaaggagatggtgcgtcaccggctcctccatctgagcgacaccctgtcgctgaccgctagaacctctgttttcctgtccctcaggccccgcacatcgatcggaccgacttcttgaacggcgtcgttcgcgagaagaagcggtttgaaaacgtcttggacgaggccgtcgcctctggcctcaacgccggtatcgaggtcctgatgggccaggtcgagcacatcatcatctcgcggacgctgccgcgtgaatactacccggtcgagggcgctgacctcgatctcggcccgaccaagggctgcaaagaggcgatcgagagtctgcagatgcactgcgagctcctccggggcagcacgtccaaagacgttctcgaggtattctaccaggaggtcggcatccggcttcaaaagtacgggaccttctcttacgcctggtgggcgctctgtttggctgacctgctcgcaacccgtctgcagcatcttgcaacgccatctcaagcggcagatcatctctctccagggcggcttccaaatcattgccgacctcaacgcctatcacgcctttatcgcgtcactcaagcagcagcggtacgtcggcttgcctgtcgcgtccgcaaagcgatcgctgaccagagcgttcctcttctgcagtgttaccgacgacttctccaacctcaaaatgatcggccacgtctacatagtcgaggacgcgaaggacctcgcccagatcgttcgcgacgccacacgctatggcggcacgttccggccggaagagtgcgtgcccgagcccgtcgtcactttaaaagtgcttatcagctgaccgctctgtctcacctgcctttcaccagcgtttacgaattcatccagcgccgtgccgactggaagaagattgaacggaccgtcgactcgagcatgtatgccctctcgctgcgagaagactgcgtcatctgttgatcttatcgattccattcactcaaagctggcggagcgccgagggctgcggagggcgtagggcaggcagagagctctgctcatcggtcagctgagctcgatcgtcatcggaagagaaggcgcaaaagacaagatggcataaatgtgcgaggcacttcgaacctcgccctcccaacacctcgccgacgtcctccttcttcagtccgacccacaagtcgcgcacataccggcgcctgccgctgtacttcactcgccgtcggccgggccgcccttgacgagctcgttgtcgccagatacgagctcgacaaaagcgttgagcggaagggccggagaggccccttcacgctctgctgcgagtcccgcgtcgttgccgtcgaaagtctgagcggccggtccggcgtcgaccgttgtggcgtcgacatggacgacgtcgtggagcgggatgaagacggtcgggctgccggtcgccgcatcggcctggggcgagacgatcgccggcggcgaggtcggtgtgccgggccgtatctcaggcatagcagcagctgggacagccgaggggcggataggcgagccgagtctagcctgctggccgacattggcggtcgttgagtcgtggtcgacgtcggccgtcgcgcctgtcatcacagcgtgcgaccgagcttgacgcccttcgcggtcggagccggcctcaaaagcgccctcgaacgcctctgcggtctgcccagcggccgaaatgctgccgtcttccatcgagagctgaccctcgccctcgagttggccaccatcctggtcgttgagcacagcgccagacgggtccggcgagacgctgcggtctgcacttcccatctccgccgcgacggtcgagctgccggcggtcgcggccgtggaggccgcgtcgagttgagtctccttctcgagaaccgtcgcgctcgcacgggcggcgatcgcagcgatctcgtcagcccggaccgggatgctgaggctgacctcagtcggctcgccggcgcggaagagcctctcagtttgctgcgccgctggcgtcggcgagggcgagggtgagggtgacgatctggcgagggcggtcatcggtgccggagcgaggctcgacccagggaagatgccgacctgaccgacgccgtggtgagcgggggtgacgcttaacgacaggccaggcagcgtccatgatgcgcctaaggggtgcaaggagccttgcgcggacgacggccgcggcggaacgaaggacagcggcgcatggagcggggagaacgacgacgaggactgctgcggcgagaaagccgggggcggaccagaaagcgccatctgctgctgctgccgctggtacatctgctgctgcatctgctgctggccgaaagacgacgcctggtaatgcgagatggccgcctgcgtatcgccgcggatgcgagcctggtcgtcgggcgacaggccaaagaaccactggctgacctcgggcgtgagcgtgtactgcggccgggcggcgtaggccgcctgcgcgagggctgccggcgtcggcacggtctgcgaggggccggatccgccgttggaagagctgctgctgctagagcggctggtctggccgttgttgccgccgccgctgccgacgacgtcgctgtcatcgaaggcaaaggggccgggagcggtgccgtaggttggcgaggactgcgttgacagccggggtccggacatgctcggtcggaacaagggccgctggccgcccaggtcgagcagcgagtggtagtgcgggtgcggataggccggcgtgtggtgctgatgctgctgctgctgctggaaaaagccgggctggatgccgaagccgggcggcggcggtccgtgcgtcgcgccatacgaacctgggaccggcggcctcgggttcgtcattgtcggaggcgccggcaggatggcgcccgtggggatcggcccgcactggtagcgagtagcggcagatggaagcgggtggccggccgccggcggtgcctgaggagcgagtcgagagagggcggcgccagggctgctggccggaggcgagaggacgagcgggggcgaaacggccgagctcgaaccggccgccgccgccgacagcgacgccatcgacgaagagcgtgggtcgagcctgacccactcggccggcaggttgaacggccacttgtcctcccagcggcaggtcttgacgccgagcttgcgaacatgcaccggcaggtagtctgcgctcttgctgttgtgcttgcacgacgggcagcggaagaagccctcggcgttgcgcgacacgcggtagactgcccgacagggggggacggtgaaagacggtcagcgagagagtctttcgttggaagcagataggaggagtcgacgaactctcgccggtgttgagcgtgacctggaccgactggatgtgctcgttggtccggtgccggcgctgggcgcccgaggtcgagaaccagatgggcggtttgcacgaccggcaggcgaactgatgcgaattatcttcgacgattgaagagccggcaggcgaggcggtcaaaatcgaggtcgagccgccggtggagtgcgaactcgagccggcagctgcgcctcctgtcggcgagccttggccggctggctgctgctgcgtctgcgagtgatcggcagaaccttggttgagcgcggcgagctgctgctgctgctgctgcatccagaactgttgttcgcgctggagggtgggaggattgcagacgggcgagatggcaaggcagggagacaagggaggagggtcagtgaccggccatgtgcaaggcaagggcagtcgaggccgtcggcagcagcgtcgtgcccgagacgtcgtctggactgaccgacatctggccgagcgggacgggtgtcgggaacgatggccgcgggtacatcggaggacggtggcggtcagagggagaggcgagcgaccgggcgaaacgagagagagagagggggtccgcgcagcaaggcgacgcgtctcgagcggaagtcggacaggacgtcgcgaagcgcatgcctcgacgaggcagccttcggcaggccactcgcttacttcctcacaagcaaaaggcagggcagacgacgtcgacagcaatcggacctttcttgcgcgtcggtgatctcgcgcgcgtcctgcgacgaactggttgcgccgtcttttgagaagccacatctcatcctctgctggaagccagacggtcgttctgcagtttcgaaagagtggtcaggggatagacgatggtgtgttggagcgctcgaatgactcacaagctcattcaagtgtcctcgtggacgacatcgcacattaggccgtcctgcagcgcgtcaagagacattctcaggtgagtcagccatcgagacgtcgacggaggagtagcaagagccgagctaacctttattgcaaactcggctcgccggccggccgatccgcccccgccaaagccgcccgcctgcgagccgccgccaaaggtttgcgacgcgccgaacgggccgcgaccgctcaaggcgccgcctgtcggtggcccggccaagagggtggcgatactgtcacgagagagagcgaaggtcgatcagacagagatctaggggtcgtgcgtggacaaagcgatgagagaggacgcaccgacgcacggtcggcgtggttggcgtcccgccggcgtacgcgagctgcagccggtacgcacccttcgaaagccaggcgtcgcctgtgcgaggagcaaacgcggtcgtcagttggtgttcagctcgagctgctttgcacaggacgcaccgagctgggcgatcaggactgcccggtcgccgccctcagagccgaggccgctcgggataccgtcctctcccagaaacttggtcgccatctggaccgtgaacacgacctgagggcgtaagcagacgaagatcagccgtcggagcttctctagcgatcccactcgagtccgaggccgcactgagcagccgtgctgaaacgcgctgcgctgcgcctcctccctgaccgtcgtcaagatccgcgtgcgtgtctgcttgtccggcccgacgtttggcgagcgcaggtgatagctgagcgagtcgacgacgaccaacttcgtctgaggtcagtgaggcgagcagggagtcagcagtagctgagggcagtctggcgccgatgagggagcggagcgctgacctgagcgtgcgtcgtgaggtaggacgagagggtccggaagaaggcgacgagctgcgaaacggtgtggagtcgcatgtacgcaacaccatcgagcagatcctgttcagagactatgggcggacactcagtgtcagcgctggcggtcccgatgggtgacgagagcagcagggacgcacacgaggtctcctctgtgagttgctcagctgcggtcaccagccggtcgaacggcatcccgccttccgtatctgaagatgaatgttggcgtcagcaggtcgccttctatgcaggggctggccagaggtcgagggacgtaccgacgagaagtactcccgcagcatcatcgccgcgctcgagcgcctttctccgcgcatcgagagcgaggccgatagccgccgccgttttgccgatgccaggcgggccagagagctcaagcacgcccccttgcctcaagcctgtcggctcttgtctctgcgggtgacagaggaggccgtcgacggcgattgagagggaggaggcggctggccggacttgagggcggaggagctgcgaggccgactgcgaagccggcacgactggtgctggcatgagggtgcctgcaagaaagtagcctgacagtcagctgaatcgcttgcttgcacgagctagccacgatgcgacggaccaggtgcgagcgacgacgagctctcaacgacacgtcctgcgccggtggcgacgcgtaggatctccgaggcgtcctcggcgctgacgttgagatctgccggaccaaaacaacgtcagccagtttaagcttgcaagcctcgctgctgtagagggcataccttgctggacattcgcagccgagacgccagcaaagtcgtcgggcgccgtctggaagcccttggcctcgaggagctcgacgaggtgcggcctgcgccgatcgagggacccagccgtcagctctcgtccggcaaccaccgataccggtcagagaggcaggacctacggcagagaaagggccgagacgggcttgggccgggcgagcgaggtcatggcggcatggcaaggcccgatggcggttggcgggcagccgacgaggctggcccgagacgcgtccaagagtggtagtggccagcgccggctgcccgagagaccctctcgacgacgacctgcttggacgacccctccagctccccacgatggcccctagcaaaggtgccgtcgacctgagccctccgatcgctccgccggcgaggctggtacacacgtgagttctcagagggcagccgacttcgaccgagctgaccagcccgctgcgtctgcgctcgcaggctatcgagccacgtcggcgctattcacgtcgccaagtacaacgtccgtactgctgctgacagcttgtccgaggcgcttgctgacggggacaacatgcaactcgctctgcgcaggttggcgcaaagtactgcctgactggcggccaggatcgcgcggtgaagctctggaacgtggccaccggcaaggagatcaaggagtacaagggccacggctacgaggtccttggtctctgcgtgtgcgccccgggctcgggctctggctcaggcgctgccggcgaggcgctgaccggccacgccctgccccttgtcgcagctcgccggacaatgcgaggttcgcgtcatgcggcggcgaccggaccgtcttcgtctgggacgtcacctccggcaccgtcatcaaccgctaccgcgcccactcgggtaaggtcaacgccgtcgatttttcagatgatgcgagcgtcctcgcttccggtgcgaaattcgctctctgagcagtcctagccgaggtgctgacttccatgatcgcgacggtcggcaggctcctacgactcgaccgtctgcctctgggacctcaagtctgtcctatcaaagctgatgctgctttgaacgcgaaacctcatgctgagcttttccgacgttcgccccttgcaggtcccagaatcgctcgccgatccaggtgctgaccgaggcgcgcgactcgatcacctcgctcgtcttctcgggcccgaccgtcatctctggttctgtcgacggctgggttcgcgagtacgacatccgaatgggcgaagtccgagccgactgcatcggtcgtatgtagacgatccgcctttttcatgccgtcgcctgccgctttactgacggccaattccccttgcagaccccgtcacctcgctcactatctcgcccacctcgccgacgttgctcgtctcaacgctcgactctcatcttcggcttttcgaccgggcctcgggcaagtgtcttggctccttcaccggccacaagggtgagagctacaagagcaaagcggcgatgctgtatggcgagggcggcgtcgtgtgcggcgatgaggacggccgagtctggtcttggggcgtgcttgacgtgagtttcgccagactgtctcgagctcatggaatatcacctgacttgatcgtccgtctcgcagtccaagcctctcgaggcggctccggtcaagcggcatgacaagttcatcacctgggtcgagaccaatccgaactcgaagggcgagatgctcacggcgagcgcaggtcggttcattgtccctgagctcctggccgaccacgaccggtcgttgactgtctcacttgctccctcttcctcgaccagacggcaccgttaagatctggaagacttgacgaccaactctagcagcctgaacgctgacggcctacgcgccgtcaaggcacattgtagctccccctcggtccctagagcttacagcagcgcaagcggcggccctcgtgcggccccgccaaaattgtggcaatctcgctcgcagagacgagctgctctgcttgtcacggatccgccgaaggactgtcgctaccctatcgcgcgtctctcatgaggcagagcggtcgctcgagtgaccggtcttgctagaccgcccgcgagtcaatcgagacgatagccatgagcattccgaggcgagagcgagcgatacaagaaagaatgcgtgacgatcagaggacgctgcgagggaccgattgagatcgggtgcggcttgtacagacaggatagatatactacggcgtgaaggcggccggtgggggagaagagaaagagcaggcgcggctcttagaacggcgccggagaagccgaccgctcggccgcaagcagggtgggagcgggcaagctatgaggggtggcagcgagctcctcggctagggaaggctgagaaggagccgcggcaggtgactgctgggctgcgatcggcacggtgactggaggaaggatggccgccggcggtgctgctaagggggtgaccgatggcgttctctgatcgccgggcggatcgaccgccgacgtcgtcgaagcggcagtggcgagcacggccggcgatccaagcgaggcagcctgggaggagagcgcggcgccctcgaccgccggggccaacatggaggcttccactgctgtgggacctggtccggcgacagatgagctcgtgctgtagccagtctcagcgagaaccggtcggtcgatgggagcaggcactgcagcaggtgcgctcggtcccgaagggattgtcggagggcggggcgcgatgacgggccatccgacgctctcgaagagcgacagaagggtgcgatccttctggagcaggcgctgcactgctggggagatctggagggaccggccaccggccgacagagccgggaaggctggcggcgatacttcccacggcgcgccgagaagcgctgggtcaacgtcggagagatcaagcggcgcggtgacgaacttgcgcggcgccgggccgggcggcttgaagagctgctcgccgcgggtgtggtcgaacggccgggtcgaaatgagggcgacggaggccggagcaggcggtgcatttttcttggccgtggctttaggcgcggtcggcttgggtgcgctcgacgccggatcaatgaccgtcgaccaaggcgtctcgaccgagcggccgctgcaagtcgcacgtgggttaaagtcagcgttcgatatctggggctgatcgaagggctagacgacgcactcgacccaatagacggagacagtctcgcgctcggatgagatggcgatgagcggaacctcgtagatcatgcccgatttgctgcggattttgatgcggtcgtagggcttgtacgagaggatgacgctgcggtggcgggccagagcctccagccttttgcgctccttggcggcctggcagggaggcaacgcggatcagcggaaggactgcgagcgcagcatgccgagcacaatcgagacgaaccgggttgtgcgacgagcagacacactcccgcttgcgcgtcgtcagctgcacctgacgcgtgtcgagcggatcctcgctaacgaggaccatcttgctgtggtcaaactcgcgctgcaagacggtcgacggacggtcagctctctgaggctttcgcttccagtcgctcaaaagggaggaactcaccaggatcgtgtcctcgttggcctgggcacatgtgacatggaaggcccgggggcacttgcccttgtcgcattgaatcttgccccccatcttcttgaggaccgggcgagtgcagacggagcagccctacagaacggagcgcgaacatttgtcagggcccgtctcgggaaagtcacgctcaaagcggcacgcacgaggttccaccggtccttcgggatgtcgcagacgccgtcgacaaacttgcggcgtgtcggcacaccatcgacttcgagctcgagctcgatcacgtgcgtctgggggaaaacgtgaaggcgccattagcggagcgcaagctcgtcatcgacagatgatcgacgcacctcgggaatgtactcggcgcagagggcgtgcgcaaagaagcgcttgccgtcgaccttatttttgccaatgacgctgggcggaacagcggtgcactcgagcagatctgccgcgctctcgctcgcgcacaagacgcaagggtagacgggctcggccggcttgggcgccttgaggatgatccggggcatcgggatcggcgccatcgccgagggctgggccttgagcttcttggccggcgcgacctcggacgctgcggcctggggggtcgccagcctcttgcgctcgccgagctgcgtccgggcgaggaggcgttcgcgctcctgctcggctcgaatgttgcgctgctcctcgagatcggcaagcatctgatgctcgcgcaggatggcgtcgacgtcgatgcgcacactggtgccggcgggcagtaagaaagatcagcttgcatactgcaggctcgagatagatggcgggcggcccacctgtcgtcgatgcaagtgcagaagcgcgccttgcggccgagatcgatccagctgtcgagcgcaaagttgatcgactcggcgcagttgaagccggtgttgaagcccgaatggtagccgcgcgggaaggtaaagacaaactcgttcggatgctggacgagcacgtttggccggcaggcgtcatggctcaggcgttggggcgaggccgcaaagctcttgtgccgaaggaactggtcgcactcggagacgtctgacgggaagtagctgcgcatcgtccgctcgagcgcgtccgccttggcctgcggcaccgcgtaccagaacttaggtgcgccaaagtggactggatcagaggcggcgagcggcgagtcagcgccggctactggcgaaagacaaggagaggacgcacggtagttgacgctgtacaggtccatgtcctcgacgtgccaagcgaaagcggcgcgccacatgccccagtagaggtactgcgcgcgagggagcaaagaagcgtcagcgcaccgcgccagtctcgttcgcagtcgtattcagacggaccggtgtgttgacgcctggcagctggcgcctcatcttcaaccggttgagcaggtttggcagggcagcgacgttccactcggtcgtctcctccgtaaagaaggagcctggtcgagacgagagccggtcagcgttgctctgtcgcgtcgggcgagtggccaaccaaactgaccttgcagatctgcgccgtaccaggcactctcgccgacgccaagcccgcgccagaacttgcgctcgagctcgcggcaggcttcctcggtaaagtcggacgccttggtcccctcgggcatccactccttcttttcgagcagcgtttcgtaccacgggtcgaggtcctcctcgggcggtggcgtcttgcgccgcttacgcggagccgggttcgacgtgaagctctcggccggctcgatggaagatgcgtcggccggggccgctgctgactcaattgttgagcgaacctgctcgccggcaggcgtgtcgtccggaacggcggcgtccggttcggctgacgctgacgttgcctgcgcttcggcagcatccaccgcggcgacgacagcagcgaccggagcaatgtcgacctcctgcttgggatcgacttccatgttttccacgacgaccgccggcgtcgccgacagtctcgcgtccggggaggtggagcgaagcgcggctgcgatcgtcgccatctgctggccgagcgccggcgtaggaggcgaccttgtcgggacgctcgttgtcgcttcgcccgacacgtcgggcattggctctacgccgaccgtgtctgttgcagcaccctcgagcggcgggaaggccaatgcgacgtgcggctcggccgagggctcggctgcgatgactaccacaccagcggtggccggcgtcaaggcttcggccgtaggtggaggctgctcagcggccgcagccggtgccggggccattgacggcgctataaccggcgccggcgcgcttgcgacagccttgttgcggtaggtccattgattgggctgcttccgcttctggccagcgacaggtgcgacaggagcggccgaggctgcgacagccttgggtttgtcgcggtacgtccattggttgggccgctttggcttcacagcgggcgacgagaccgcgcctgccggcgagactaccgctgacggtgctgcctttggcgcgtcgcgatacgtccactggttcggctgcttgcgacgcgcgggcgcttcggcgtcagccgcatgcgaggacgcagacggtgcaggcgagcccgacgctgccgccgctaagactttagggctgtcgcggtacgtccactgattgggttgcttgcgcttgacggcagccggcaggggtttcatctcgcggccgtcgatggcgtcggcgaggaggccgaggttgccaccggagctcgcgctagagtctacgattgacgagccgctagtcttcggctgcgtgcggtacgtgtactggttggcatgcttcttcttggcgggcgcctcaccggcggcaggctgagcggacgacgacgcgaccgaatcagccttagagctgttgcggtaggtgtgctggttcggctgcttgcgccggatgatgggctcctcgccctcgagcgccggtgccgacgagagcgttgatgagagggcggatgaggcgggcgagcccggcatctggtccgatgggcgctccgagttcggcttcgactgcaaccggcgcgagggtgaagaagccgtcgcagcattctgcttgtcgagagcggactcggtaagagccgtcgagggcgggacaaaatcgaaggtggcgccggcgcgctccgacggcgcggtggagccattgccgtcggccgctttgacgcggtaggtgtgctgattgggctgcttgcgcttgacccagttgccgttgacatcgaggacgagcggcggcagcttttggggctttgcctggttgcggtacgtgtgctgattcggctgcttgcgtttgacgagctggccattctcgtcaagaaccatgacggcccgcgacgacgctgccttcgggaccgacgccggcttgggcgcgtcacggtaggtccattgattcggctgcttgcgccggaccggctgaccgttctcggcgacggcgccttcgggcaccttcgcagtggtagcggcgacggcggccgaagctgatgtcgatgccgtggaattgtcgcggttgcgatacgtccactgattaggctgcttccggcggaccgcctgggcatcggcttccacaaccgcagccgcctgcacctcgctgctgaccgtctcgagaggcggcggccgagggataggctttggccggtacgtgtagagggcgacgaccttcttgcgggcgggtgcgacggcgtacgtcgcctcgcttccagttgcctccggcagaggcgcatctccgggagcggtggcgacattagtggtggacgcgagagaagggacagtctcggacgttgatggcgaggcctcgatcgcggaaattaaagccagggcgacaatgtcgaccgaggtcgccagcgtcgtcgaatcctgcttgtcgctcgccggagcatcgtttgtcggcgcgagaggggcgacagccgatgtaactacgtcggcctcgacaacagccagagggccgtcggtctcaaccttcgagtcgagtgccaactcggaaggggttgcggcagtcgtgacagcctcatcgggagccgtgggagcagcaggagcgacatccaccatcggctcttttgcgccagctgcgtctccgtgagcagggttggcttggccttcgcctcgcgctgactcaatcagcgccgcctctgccgctgccgcctctgccttggcagccgtcttgcggtaggtccattggttcggatgcttgggcttctgcgacgcggctgtcggctcctcctttttcttcacgcccgtcaccggtcggtcgctccgagaggtctcgtgcaagttaggtgtcctgcaggggacaaagtgcagcatatcttagcatgactcaaccgccagcagactgagactcgattacgcaccggtactgaggcgatgtgcacttctggaaccagtccttgaccgtcaatggcttcttccgctcaacactagagcgaagaaggggtgaccggtcaggaggatcaagagaggggacatcaaagagactggacagacttgttaacgcggaacagaccagcccggccctgcatgtgctgctggatcggtgacttgatcttgaggccagcgatggcgtgcgcagggatctttggcagggcatcaatcctgcaaatagggggcgtgcgaggagtcagcagatgagagacacaaggagaagcagagggtggcggtggaagtggacgaaatgaggagttcgtctggcctagccgagctcggggacggcccggctgagcccgcggaacaagctcaagctcagtcaagaagatgttcggacgcaccattcatccggtgggatgaccttgacgatgccagaccggcggccccagtgatcgacaagattcatgtagccctggatggcgcgacaggtggcgaagaagaaggaagggatgtcagttggataagataacggccgagccgcaagcggggggaggtttccgtcggctcgacggcctcatccagggcggttctttgcgctacgcacctcaaagtcgacgaactcctgcccgagagggaagtagagacgtagactgtgtcagacaagagcctctttgcagcagaggttaagtaaacagcagacgcacctccatcgtcggcttgaagaccgggattccgcgcttgcactcctcgtcctcctccgggtcgaggtagagctcgccatcggcgtcgagcccgcggttggcgtcgtgcgtccgtgcgcccggtccaatcgcgggacgggagtggacgtagtagtcggccgggacggcgcctggcgtcgggtagaagaaggccggctggacgtgtcgcaccggatggtcgaagtcgagctcgaccggcggcggtgaccgagcagcctcatatgcccactgagccgatccaaggcatccacaagctctcagagctctcgattggaggtggaaaggtactgacgacctcgtcctgcggcgctgggggtgcgaggcagcctgccatcgtcttctggctgtcggcatctggggccggaaggtcggccgacgatggagaggcggcggcggcgacgggagtcttggtggccggctcgggctcgatcatgggcacgtcgccatcgccagtctgcgggtcgagcgcctccatcgtaggccagagcgagcgagctgtggtcttgctggcaattggttcttgaggatgggtggtgtggagagtgggagggaaggccggccgcagcggagcagctgggaggccaagggaggcgagctgcgaggcgaattgcagctggaggttcgactcatcgaggcaggttcggcctcacatgcctgagccgacgtcgagcctcttaagtcggagccagtagaacatggcatctcagtatggcatcagccgcttgcgctcctcctgctcgctgatgagccgtcgctcgtcgaggccggaggaggcctcctcgcgcatcgggtcctccgcctcaccggcgctactgccagcttcgtcccagccggcaacaaagccgtcgagcgagacccgcacgcggatccggcgctcggccatcagatccgacagctcctcgagctccttggccatgtagaccgtccgcagaggaccgaacggaaggagatagaggtctggagggtcgggtgacgagaccggcgtcagtgtcatccttccagcaggccgagcccgcaactacgcacctttggaccagggacaggccttgatcgcgcgatatagcagcctcttggcccgtttcggctgaccgaggaggatctcgtggtcgatcgccagacgccacagtgagagcgacatgttcgcgctatagcacgaagggggcagtcagccttttggtcgagtgcgagacagaactggaaaagacgacgcactctggccgatcaaacgcgcgctcaaacagactgcggacagcccactcgttatgccgacccttgacggcccgaagctcagcccagacggcaaagaggaagccgtttggacctttggcgcccgtcgccggggcgaggacgacctcgtcgagcaccttgcggactttgttctggtaacgcatccgcgactcggtcgcagcgtagtagctgaggagcgccgtgttgctcggaaaggcggcgatgccgcgctcgaggaccgcgcggacccgaccaggctggaatgtcgatcgcggcgtcgtgacgtgccggaagagcaggtcggcgtactgcaagtgcagctcctccttctcggcggccgggatgctgcttgaggcgtcgaggtgccggtcgtagacgtcgcaggcggcttgaaggccagcaacgtcgtactcgaacagggctgacaggtagatgaggtttgtcgagttgcgcgtcgtcgacggccgcgaggcagggtcgagcgtccgagcgatcgtctcgccgagggcctgacgcgtctggagtgcctgcaacgggctgagggtcggagcctctggtcggagcagtgagtctgaagcgagagggtgacgatgagcgaagggattctcaagggacagaggaggatcggtagcacaaacccaggcggtcaaagtggccggaagctgcgacggtgacgatggcgaccgcatgcgcgggacgactctcgctttgctcgagctccgcccagcctctgaagagcgtccagacgtcgccgtcaccgagcgcgctctgacgccggacctcggacgagctgagcgacagggccgtgtggtagactttacggccctcggccagcttgccgcgctgacgctcgagccgggcgtaagcgttccagaggacgagcgagtcgcggttctcagagaggatgcccttggccagcttaatcgcgcccttcgtgttctgcgaggcctcgaaagagatggcgtaaagcgagtaggtcgggtcccagtggaacaggcggcgcagctgctccaggacgttgctgggtaaagggtaaaagcaagggacctgaggtcagccgacgactagccggaaggggtgaggatggcaccgcgagctaaccagatgagtggcctgaaacggtcgtccactgagtgacgcgccaggagatgcgggcccgttactgacgcaggcacgagggcctcggccgtgacgggggttgccttgatcgggcactcatgcggcgaagggatgcctccctcctgttcgggctccatgccgccgtcgctgatcaacttgcgcgggacggtgccaggtgaccgcagatgctctgggaagaaggcgagacggccgaggggcgagtgcgccagtgtgttgaggaggaaggcgtccgagaaaaatggtgtcgaggtcgaaacttctggtggggcaaacggcaggtcgaggaaagaaaagagggcaaagacgagctgcatccgcgaggactcggaactgagcggaagcaagaagccttcaacgtcgggccaaaggacgagcttgaaagggtcgtcctcgtccgtctggccttcggcgacctgtcgcgcttcgtcgtccgttcgggccgacagcaccgcctcatctgcgacagtctcggccgcgagccagagcgtgaagggttcgtcgacagccggcggggccgggggcggctgggacggcgcaggcggattcgaaccgacaccggccgagtggcaccagccgcgagcgcccgtctcgccgaaccgaggggcttcggcctcccagaaggtctcgagcgacgagacctgctctgcccacggccagcggctgatcgtaggtggcaggtaaaaggtaatttccatctgtgcttgcaggatggcaatcgcccgttcgacgtagcctgagtcagagggtcgacgtcgtcagctacggcgaggatacctaaagcctttggtcgagaggaacaaaccagcttcacgaagcgcaacgcaagccctgaggaggaggtagatctcgacaccctcgaggtcctcccgatctggtggatgaaggctcgaacgtcagcctaggcaacggtgcaccgatgcagttgcagcgccgcagactcacctgtcgacccgtgcggagcatccctccacatcgtcctcagccgctcgagaccgtcctcggcccagcgcgtgaggtcatcgccctcggcttgctggccgctcctgctcaacatctgccacgttccccaagcgcgccagatgttgacatccttgttgagtggcccagagaggacgcggtcccatcgggcggccagcgccagggagtcctcggcctcggccgccgcctcgagcagggcgagcacgaaggccggatcggattcgagcgaaggattcgacagcgccgcgcgatcgaggacggtaaaggtgatggaggcccgcgacttgctcgaaggtcctggcggcgccgaagacgagaatgagctgcccgatgcaaggggccggacgtcaaagccagcgtgcgccgaaaagtgcgcccaggcgagccagttggcaacgtcgaggggcgcctccttcgcttgctgagcaaagcgtaggttcctggccttgtaagccgattccttggtctcgacacccgaaccggcttcgtctttgccctcgtcgtcgacctcgtcgtgatcgatgccaggcagccgtccaaaaacgccctctggcagggccgcgccagactcggcctcatcctcctcttccgacgacgacgacccgctcgcggcgtcgatcgcccggtacgactcctcaaccgactcctctattctcctacgctttgagaagcggacgtagtcgccgaggctcgaggttgtcgccgactgcgccgccggctggatgacgagcgagggcgcgttgagcaacccgcgagcaagcttgtcagagtagcgcatcgcctatgcacccagagcaatctgtcaatcagcctgatagcatggcgaggtatgtgaaacagttgactcaccttggaccctttgcgctctcgccactcgacgaggacagcgctcgagcctgaagcgttcggatcgcgggcgatcttgaagccttgagggaggccgacgacactcccagctacaaggagatctttgtcggttcagctctggataagcacgagtcacacgatcaaaggccagactcaccgcctgcccgatggaacttggccaggctgtacttgtgcaaggagccgaaagcgacattggcctcgtcgcctcggccggcggcatagtatagctcgttgacgaccggcatcccggccgacgtcgacggaacaggagccgctgagctctgggttgtcgctctgctcggctccttgtcccgcctcgacgagcttgagctgccggacggccggtcgcggtggggtgacctcgacctcgagcgtcttcgccggccgagggagctcgacggctcgccccgccgccggtcccgctcatcgcggtcctccttctcgtgcttccggctacgatgcttgctgtcgccgtcccgccggtatgcgtcgtccttgtccctcgacttgctcttgcgggcgccttcgggcgagcgtgagcgacgggtcgaggaagcgccgtggcggctcgacgacgaccgagccggcggcggcggcggaggtgcggcaaagaccgggaagtcgggaaaggacgaaaatgaaggcggagggtttgccatgatcgctcgctggtgtgcctaaccgactcggcaaggccaaatgagagaagaagaggcgggcgagatgcagttcgaggtgcgtcgaggcagcctccttccgtgggcgtcgtctccgagctcggccgtgtccgcgcagcagaacgacgcacgctctcgctcgtccgactgccgcagaccttcccttgtctccccgatagcagtcaaagcttgcagaaggctgatggtcttgttcgggtagattgaaaatgcgagtttctatacacctggcctgagcctacgccagccgaactgccaccctttagatcttgctccgactgccggcgtcagccgcctgttcaagcgcacccgggacgacgccgaccttgctgagaaagtccatgcgctcgactcgcagacgaccggccggtgcccaatcgacgagccgccatacggccttcaacaaaggctcgagcagcgcccggtcggcgccgaggttcatggcgccgtggaagtgaccctgcgaggccgccggggagggggggcggtgcatcaggcgactgagacagaaacggaacatagctgttcgagaagcgcaccttcgtctgtggcggaaggtctgacgaaaagcagagcacgaggcacagcagggatgactcgagcgggtcggtcaggatgcgggcatcgctcaggacgggcgtgtacttgggggcgtgaagttgagagcgagtcaggctagtgaagcatcgacggtgggcgacttgctactcacgatgagcttgagagcgcagtcgacgaggttcgggtgaccccagcggagactctcgacgacccggcccgcgacctttgagtagatggagttgaagaggcgacgtccgcgcgagacttcctcgagcggctcgtccttctcgccagccgagccactcggctttgactcgtgcagcgggacgttgggtccgagcggctcgaaggccgtcgggaagggctgcgtgctttcgagccgctcaacaaccagccagacagtcggataatgcttggccaagtgcgagctgaaggtcgtgagcgacgagatggtgagcgggaaaccgaggagcgggaatgactgtgaaaagggacccagcgatggtcgagtcagctgggacttgctgagagcgattacccgcccgaccggggctgctcggggcaggggagggaccgtcggggacaacgcactttgagcagcgcctcgcggattcggatggccaggacgagggcacctccgtccttgcttctaaaggcggcccactcggtctgaatgacggccgaccacgacggctcggcgacggagccgtcggcgggaagatggtcgacagtcgtgtcgaagaggtcgcagatggcctgcggctcgttcagtcgcgagaggacggcgcaaagaagcgggaggtggatggcgtagggttctgagcgcggcagattggccaggagcattggtaagagagcttcaaaggagagggaagacatgcttggggctgaacggtgttcggagcaggtcgagcaggtcgtggttcgggggagaccagcgcaggcgcagcagcagctctcgcccgcggcgtcagagcgacgcgggagcaggacgagacgaaaggccagggagatggcttcgacccgaaccacatccgtcgacacgacttccgcccagattctatcctctctcgacatgtcctctgcagtccaacggacggccggctcgcgttcgatcgacggccgggccgcgaacgaagagattgagcgacgacagccgctgcgagaggcggctggcgagctcgtcacggacccgagggccttccgtctgagctacccaccagtctatgcggcggtcggcgcctaccggctgctcaccgactggtcgctcttctgggccgtctggaaaaagtgcaagcacggcgcgatccgaggccttgccgtcggcggcggctgggtcttcctctcggccaaagctcagcttgccgtcatccgccgcttcggccagtacctcccgattgtcaaaaagtacaacacagagcacgtcgttctcggccagaccatctctgtcgcgacctatgcgacgactttcatcctctcggcccagttctactgtgcgtgcaagtgcgctcagcccgccggtcaggcgcgcagctgacctaggcttccgcctcgactcacgtgaagacctgttgcgcttcttcctgtccaaaaacatccgcatcgcaagggagcgagcctggagtcaggtgtgtgctttgttgtggtccctctgcgcgcgcctagcgttgcgtcctgagctgactgcggcctcccatcgcagaccctcgagtcgcgcggcaagcgtgagtggggcgggcgcacacgtcatcaaggcggcaggccgtctttgctgaccctttgcgctgcccatctgccgaaacccaccagctgctagcttctggggcccttacgttgaggtgtgtcgctcgcccgcacttacccgggcgaccggttcctgccgctgacccggccctatgctgctctgcaggagtgggagacgccgccgatcgacaaggctcggcggaccaagaagcgcctggcgtggactaagtatgcactcggcttcgccggccgctttgtcctcaacaagtgtcggttgctccctcgtctgtgagagacggtgcaagaggcgctgacttcgtcagcttctcccgctcgcagtcatcctcttccctctccagttcatccccttcgtcggcatcgtcgtcacctcggtcgtcagggcgctcggcactgcccgcttcctccaccggccgtactacgtctcgaagaagatgacggaagaccagatcgacgtcttcatcgaggagcgcaagtgggactactttgctttcggcttcacggcggccctgctcgagagcctgccattcttgggcatgctcttttcggtgggctctccggcatggctgtctctcgtagtatccggtgctgaccttgtgctcggttcgcttcacggtctttccaggtcagtaacagggtgggcgctgcaatgtgggcccacgacctcgagaagcgccagaacgcggtccggaccggcgagctcaagctccagccgcacggcaagacgtcgatcgacctgcttcctggcgcagagcggctcgggctcggcgggctcggccgggtcgacgtcaagagcgacgttgttcgcgaccgggtcgacgttggcgagatggtcggcggctggacagagaacaagaaggagctttgagggagtcgtcggcggcatcatctggtcatccgacgctctcttccgtctgcatgatcctctttctcagcagcacgcatctgcgctcctcaacctggtcacaatcgctcaacctacagtctctctgataagtttcgctcgacctcccgaaactcggggctgtacctgcctcgcgtccgatcgcaatcatcgcagaagcagggtgaagcatatatacagttggggccggcgagcggctctacgcgtcgtcggggatcgtcaggacaatcttgccgctgttcttgttcgactgcaaaggaagatgtgtcgacgaggtcagctcattgacgagcagaggagcatgctgcaaagagtggcagacgcacctccatcatctcgtgggcgtcgtgcacgcgctcccaagggataacgtcgtggatcatgacctgaatgccaccgttgccctcgcccttcatcagcggcaggacctccttctcaaaggcgtcgagcagccgcttctggtagggctcgtcccgcgcgcggagcgtcgtccccttgagcgacaagcgcttgtagaggatcttggagaggtcgaccgactctacggtcgcgcctgagagggcagcgaggaagacgagccggccggaaggggcgaggacgtcgatgttgcgcttgaaatagtctgcgccgacgaaatcgatgacctgattgaaacgatcagggtgtcagcagctgtcagctcttgcgagcaggtgcaaccccgtagaggtcagggcacgcactacgtcgacgcccttgccgtccgtctgcttctggacgacctcggcaaagtcctcggtacggtagttgatgcccttggtcggcgcaatctcgagccgctcgaggaagcggaccttgtcgtcgctgccggccgtcgtcaggacgtgctttgcgccggacgcccgggcaatctggttagcggcgacgccgacgccgctcgcaccggcatgaatgaggaccgactcgcccttcgaatactcgccgacgaggacaagtgcctggtacgcggtcaagaaattctcagggatgccggccgcctcgatccacgacaggcgggccggcttgcggataagcatcgcgcccgagacggcgacgaattgggcgtaggcgccgccgtacgtgaggccaaagacctcgtcgccgacgctccacctggcggccgagatcgtctcgccggcgatctccttagactcgtcgtcaacctcgacgacgacgccgctgaactcgacgccgagaatcgggccagcctgcggcgggaccgggtacttgctgcagagcagcgagggtgtacagggtcagccagagcctacccgttgccagctgctcggtacgcacccttctcgttgcagaatatccatcctgttgaggccgaacgccttgacctgcgagagggaggcaagccgtcagctccttgacacgaggcgcgcgcagccgggcgacaaagccgacgcaccttgacaaggacctggccggcctcgagcgtcggtcgctcgacctcgccaatgtagagcgccgaggcatctcccttgtcgttcttgatctggacggctttcatcgtagcaggcatggcgtctgggcgaagcggttagctgcggaagggctggcagcaaaggtgagcagcagttcgaacatcagctctccttcctttcaagcgcctccgggttgcagcgacgtacgagtagaaggcgtaggctcggtctgggaggaaggtcggtgttggtgggtcggcaggcagcgacgatgctattccgagaggcgtcgtcacttgtcggtcggttccagcgaagtggaggggtcggcccgcgcaagaagctgagcagccggagagagacgacctcgccttgaacctcgaccatctcatcagcctcacaccaggtgagctcgctcgcagctcgagggcgctgtgattcgagctgattggtgtgaccagcagcaggtcatcgttccgctcggcctcctcccccggcccatcaacgatgcgaccgcgcacgacgtcgagccagccgccgcagcagtcgcccaaggagctctaccaggccgcctcgacgcacttccttcaccgccagcatgcaccagctctcggtgcactcagtcagctgctaggtcgcctgccacaggcaccggccaacgcctgggcggccgacctgccagccaagacgcggacggccgagcgctggcggaccaaggcggtcgagctcatgctgacggccgaggtcatgctctacaaggcgacgcccaagggaagcgcacacgacccacaacggatcgaggagcactatgcggcgctcgagcggcgtgcagtcgacctcttcacaccgtcgccggtcccgccgaccgtcattcttacgctcgcccggtcctgctcatccctcggcctgccgaccggtgtcgcccgccaatcgctcgagacgtggcagagcagcatcgcacccgagcttctcccggcactcgccgttggactcgaggatgagccgaacgccaaatgggtcgttgacgcggtcaatggctacgagggggcgatggagtacctctggctcgagacgagtgagggcgaggctgcgcgcgaggaggcccgccggctcgtcgactgggatcaggtcctgtcggaagccagcaagacggtgagctccgctcgggcttgttctctgggaacgcggagctgacttttctttgtcgcctcctcatcgcagcggatccgcactcgtcttgaccgacctccaaccccacccgcaccaccgccgccagcgctgcccaccaacccatcggaactcctgtcgtcctcacccgccctacctgaagccgacgctcccgacgacaactgtgagggcgagtcgtccgtctcagcctcggtgccaagtaccgcctcgggcgcgtacgccgacgccgacgacggccagtcgcttcacgcccccgccggcgtcgcccagacgctcacgaaccggtcagcctacaccggctccatgccgccaagtccaacgctctccgcccgcacactctcccccgcgcctcccctattggcgtcctcgtctcgcgtcctcggcgtcgcgagcgctctcgtcggccgtctgaggcgcgccgccacgccagtctcggtcggcgcaccggccgcgctcctgctgtttgcgctctttgtccttcgccaggcccgcgcacgtcgcgtccgctggcggacactcctccggcagtggatcgtcaccatgttctccgaggtcgcgatggaggtcgtcggcctttaccgcctgggcaccgccctcagctatgtctaatccgtctcatctttcgccgccgtgtgcaacctttacctcgcatatcttatatggcccgcttcccacctacagtttcggcgagatgagtagagtcaggcgcagagggacggtaggtgctgtttgtgccaggccttcccctcctgtcctgctactgtggacagccagcgcattgggttccaagcatgtggattcaggaatcggagtcgcctaacgtacaggaaggggaactgagacgcagaaggcagagaaggagaacggggaagagggaggggtcggagagatgacaagagggaacgacggtcgaggagcagcgtttcgtgaaggggtgtaaacagaggtcggtcggagaacgggcggggtcggtcggcaatcgagattgtggggtacgaaacagtgtgaagcggggcgaacggcgcgggcacaggcgggggggtcgaggcataactcatcatccctgcgaaggggaaggcgggaaaggggagaacggaaggcgaatgagaggctagacagagagaatggaggagactagagcggtgctttttcagcaaagcactctagtagccgccaccctggccgccctgctggtagccaccctgctgggggtctgagaagagagcggtaaggtcagcagaggagagaggtaggagcagcgcaagctgtcaaaagacatacagccaccctgctggccgccgtagccgccggcagcctgctggccgtaaccggagtcggcgtacgagccctgctggccgtctaagagaggggaaacgaagaaagtcagcgctcaggttgggctgtcgcacacagcgaagaaagagaaacgcacaaccaccctggccgccggcctggtagcctccgccctggtagccgccctgctggccgccgtagcctcctccgccgtctaagaagagcgccaggattgtcagtaatcgcgttccggtggggaacagcaggagacgggtcacgggtacgcacagcctcctccgccgtctttttagggacggacgagaaagtcgaggttttcacgagggggagaaagaagaaagggcgtgggttgagtctcgatgttttgtggcctaaggctgaggaaggggccgcgaccggtcaagaggcgccaaagcgggtgttgaactcacagcctcctcctcctcctcctccgccgtagcctcctccaccgtagcctcctccgcccgagggcttcgagttggcgaggttgacacggatgcggcggccgtcaagatcctggtcgttgaggccgttgatggcaccgttggcctcgttctccgaggcgaaggtgacgaagccgaagccgcgcgactttccggtctcacggtcctacggaaaagaaagacgacgtggcaagcgagcgatagaggggggcgtgagcggcagcgctccggcgaaaagagagagcggagaaaagaggctgtacggtcatgacgatgcactgcgcagcaggagagcgtttgcggagacgggaccgatccatagcagggcggaggccagattttgcggcagaggcgacgggtccgggacgggatggtgaaagcgacgatggattcagcaggcacggggcacacagaggggcaaaccagaaccaatcgttcgagtcgcggtccagagcaaggcacggaagaggatttcaagagagcaagcacgatcaggattctggccatgggcggttggggcaagaagcggctctgcgcgcggcgggcacaaccagaagcgccgccgggcggcaggtgtcgaaaagggaaggagaacgaacgtcggtgacctggccgaagttggagaaggcctgctggaggatgtcggtggtggtgttccacgagaggtttcctgcaagggcgagcggcaaactaggcggtcagcggattgtccgagagcgtgatcggagccatccagcgcgttacaagccagaggctgctggacgagcggtcccggacagagcgagcgctggcccaaggtacgcccacggcctgagctcttggcttgcgactgctccagctgagccgtctcaggcgagagcgggcgggcctgtcgcatcttgacggctagagccatctcactcgcccttggccgcctctcgcgccacatcctgacccccggcgtcgccagcccccgttcacgaaaagaacgagcactcaccgacgtagaccttggacatgtttgctgatttagaaagggttaagagaggtgggttgagaagagtgggggtgtgagtcgaggtcggtcgcagcggcggccagctcgcatctttgcgcgggcgagcgggcgcgcgggcggagtttgaaagctgatgcgcaaagaaaacgcaaccagcgatcgactgcccaccgggtggactctgcctccgcccagtcgttgcttgtcaagcctcgctcactcgctagaccgtcttgccgagtcgacgtgctgactgtgaacctgacccgagaggaacgggtgtcgctgacgacgagggctaactgttcaaaggcgaaggatgggcgcgcatacgaccgcacagagacgaggggaaaccgccgccgccgcacaaatgacgagcgacatctcgagtcggcgggacaatggtctggcatgctgttcgccgtcctagcctgatgcgcactcgacagcaacaccggcaggttgacccagtgcaagatgcagcgccaaatgatgcggtcgagcggttccctgtcttcggctttgccattgcttcgacccctttgtctcttcccatctgtccacttgacgtcgttcaggatgacccggcgggttccagtgcacttctctaacacgtcgccttttggtcagtcgctgtcgcgttgctttgaccggcgtccgacatgtgcaccagtaacgacacccctttccgcgcctcctgtgacgtcgccgcgcggcgacgagccctcacctgccatctcgccttcactcgccctttgctctcgactcccacccaccctctctcctctgcgagcatgccctcgaccaatccagttgcccagaaggccgtctcggagcgcccggctccgctcgacgtgaccaagccgaccgagccggccgagaagggtgcgtcgagcagcggcgtgagcctgcgagagacatcggggccgtgccatctctggcgacggatgttgctgtcacgatctgttgctaaccagaagcccatcgccgagccgtactcagaccgcgacgtcaagcgcaagcttaaggcctacgaggtacgcagatgagggtgatggccaggagctcctctcgctgaccgcggattgacccctatcccacacgtcaggccgtcaaggccctccaggccggccacctgccgagcaacgcgcagatcgacctcctcctccgcagggcgatcgagcaccagctcgtagaccccgccaacctctcgctaaccacgaaggccatccaggccgacgtcaatgtgcgtctgcgtcgaccgccatgcgcggcgggactgcgctgacttgctcatatcctttcccttgcaggacctgctccagacgctccgcgacctcctccgcgcgaagaacgaggacgagctgatccaggagttcatctccgagacgcaggctgtacgtcgctgtggcgcatcaagcgaggtgccggccaccactgacggccatcctcccgctccagccccgcccttcgtcgcaggagctccggacctcagccgacaagccgcatgccaaggaagacgcttcgacggctgctcagcacttgcgcactgtcctcggcctcgtccttcagaacgccgagttccgcaaggtcttcttcgacctcggcaccgtcggccgcgacgtgtacgtgtcgcactctcaagcgctcagcttgccatgtcagactgacacaaccgctcttgtcctccagtcttgcgacggccatcaccaaagtagccgaggagaagatccggccgaccgaggagcagctcagcgcagtcgaccgcgaaacgcccgccggccagacgacctcgacgccgatcgaagacatcaaggtcggccaactcgcctcgcgcgcgcaggagggcgtccaccaggcccaaggcgcaaagcaagaggcgcaggtgacggccggccggcagacgcacgagggctcggaggctacgcgtggtcagcaggtgagcgaatttgccggccagaagaccgagcagtccaagaagattgccggcgagagcgccgagaaggtgcggaggacaaaccaccttgccgaagcacacgcgctgacgccctacagtcctccagacgaagcgcaccctcaaggagcgctaccacggcctgcgcgagcggctcactggcgacgacgactcggacaagctccgccagcataagaaccgggcccgtcacttcctcgatgagcacctcccggccgagcgcagagaccagttcctctggcgcctcaagaaggccgtccacgagagccagcagcgggacgagtatgacgagggttagaagctcatcagccgctgcggggtcgcctgtatgcgtgctaatgctaaacggcgcactttgctcttgcagccgtctcgtcgctgctcgacctgatggacgactaccgcggccaggcgacgcacctcaaggcggccggcggcgaccggacgagcgacccgattttccagcggtcgttcgaacaccttaagatcatcctcgcgcgcctctcgggccggccgctcgacggcgtcattgctgccgtcgaccagctctacgatgacgcacggcacgatgacgccctccgcgcctggtgggctgacatcgacgcctacgtccgcaagtcgctgctcgagccgggcttcatcgtcgacgacgactgcgcccgcgagggacgagccctccgcgaccggagcgacgcctttttcaaggacaaggtacgacgagtcacgcgagctcgtggttgcatcacgcatcctctgctgactttcagcgatgactcctgcagtacgcagcccacaaggaccgcctgttcgacgagatctcgcactggctgaagggcttcagcgaaggtgcgcccgatcgcgttgttcctcttcgtcctaccgaaactgaccgctcatactctgctgcagactcgctcaacgcccggctcggctctgatgtccggcagctcgccaaggacctccttttcgacgagagcggcgccttcaccgtcaagaccgaggtctgggacgacctccgcaaactcgtcctgcctgccgccatcaaccgggccggctacatccccattccgcggattgactactctgacaaacaggtcgacatctcggtcgagggcctcgttatccgagccgagacgctcttccccaacttcatcgacattgagtcgcaccagcacattaggttctctcccacacagccgtcggccgtcggccccggcgcgacctacggccgcctcaccgtccggctcgagcagcttcaagccgacatccgcgactgccatgttgcgttcgccaagtgcgtcgtgtccgcccgtccgcgattgtccaaaggcgagctgacctgagtcacaatctcggtggccctccgcagaaaggccggcttccccaagctcagggacgccggcctcgttgactgcctgatcggcggtgagggcatcagcgcgacgatcgtcctcgagacggcgccggccacgtcccagtcggtctttgtcgtcaaggacgtcaaggcgcacgtcggcacgctcaaggtcgcgacgcgtgagatgcaccacacctttatctaccaggtcctcttcccgctcatctcgggcctcatcaagcgcaagattgcccgatcgatcgagcagtcgatccggaccgctctccagtacgccgacacgcagctcgcgaccgtccggcgcgaggtcaaggaggccaactcggagcctggtccgtctcggtcatctcgtcagctctcgcttgccagtggctgaccagtctcttgtccgcccgtgcctccttccaggcatgaagaaggtcgacgccttctccggcctcgtcgccaagaagaaggcccagggcgaagaggccaaggccaagactgaggccaagggcgacgagctccagagccgcgtctcggtcggcccgccgctcgagctctcgccctcggctgcgaccaccgtcgtctcgagcggcactgccagccagggctggaagtcgtcggcctttgacttcctctgagccgacgtgacgaccgccgcctcgctgcgctgcgcatcgacgcgccagcgacagctgtcagcccacgcaagtcgaccctctccgaggcgaccccgctcctgtcttttattctcacctttgacgatccttatgccctcctttcatctctcctgcttctatgctgtgttgtcagcgggtgctctggcttgagagagccgaggctcgtgtcgcgctggtgaagtcagtcgccatcagagccgcgacgcgtcgaagccgcaacgtcctgctcgctccctcaacaacgacttccgaccgtcagcaggtacctctccctcgacaaccttctttctcagaccgtccgtcatggcgctcatggaggccctcgcacgcctagatgcggtcttggatcgcacgctcgagctcacggtcagtccgtctcgcaaggccctcctggttgtccttccgctgacctcgcaccggtcgcatcagggtcacgcacctgccccgatgggacccttcacggctgccttccacacaccagccggtttgctgcttcgggacgcagagccaggagagcgcgagatgtttgcctacgtcgggtgagcttgcgacctcgccctcgaagcgacgcctgtcgagctcgcctcgaggctgaccggctgcctctcctcgctcgaccagacccaaggctacggcgacgtcaacgcatgcagcgccctccatcccagaccagcccttcttcgagttcacaccgcttcagccagcgacgcccctccggccccgcccggccaaggcgccgcctgtcgagcccgaggtcctgctcgaggccgccctcaagctcatggatggcttgtgcgtggcctccatcagaagtgacttgatagatcgtaagctgaccggagggtttaagtattcgtcttcagccgacccatgccgagaaagcgcaagcttgctgtcgcccagctcgccaaggtcgaggcgctccggaactccatcaatcggctcgagcaggatctagtgagcgccgctgattgttcgctttctttgacaatagttgactctggccctgcaggctgccggccgcatgttcccagtcacagtcgaggaatctgtcgagggcgctggtgatggcgaagtgtcattcgaggccatgctggccgaggaagaggccgagattcaagcgctggagcggaagttcatgctcgcccggaagctgagagcggcgcctgtcagtcttgattgcctatcttgaaactcgaacagcccgtgctgacctcttgttcttgcgtccgcttcaggccccctcgctcatgtcgccgatgcgcgtccagatggcagctcctccaacacccaggtcggcgcgccgaccgaccgttccgccctcgccccggcccttctcggtcgccgcccaactcttcaagctcccgccgccctcggccgctcagacgtcagcgtggcagacgcccacgatcacgcgtttcctatcgaactcgcagaagagtcggacgccaggctcgctcgcacggccgacgccgctcaacttcggagcgcccgccgccgctccgtcggtcaaggcctttgcggatacgtcggtcatcctggagggctcgcaggcggatggagagagcctgcttgacgacacgatcctcgacgatggcgacagctcgttcccgggcgccgacaacgacgacgacaccgtcatgctgtctctgccgaagcctgcagccccggcacccgctgtgccgtcctcccctccggcctcgtcaccggtggtgttatccgatgagccagctgctcttgcggctctcgttgagcctccgctgcagtcgatccctgacatcgtcgaggccgagccggaaccagcggccgcgactcgaccgctgactgcgcagcctttgacagatgctcagacagcgatcctggtgcgtctgagcaagttgaaaagatcgtgagagcgtctcaggctgatgtccttccctgccctgctgcagaccaaactgtggacgccctttggtgacattctgcgccagtcgccgcttgcgccgtcgtcgagcgacgagacgctaccggctcaggagactttgtgcgtcactgaattctcctcatcatgatcgcccccgccgctgatcccctgctccctcatactctcacagctacgccgttaaagccctgtcagagctgccgcctccagcggcgccgacctccatcacctcaaccacctcgtcctcgacgccggccttcccggtgaccccgcagggcattctcctcgcccacgtcttcctccggctgctcgcggccgacggccactcgctcacgatgagcgcgatgaaggcggctctcgcccaggtggcgggcggcgaagagggcggcgtcaagtgcatctattacgccgtcggcaagcgcgggctcgcaatcaaacgaggcggcggcgaggcccgcgtcgagtttgcctgagcgcgagtacagctgtgtgagtctatcgccattctggtcgtgtctgatgagaagcttttatgctggaaggatgatctcgcctgcgacggcgacgtggtcgctcgcgctgagcttcgtccgtggcaagccggaaccgagcgtctcggccgagtgcggctggaggaaggcggtgatcctcgggtagacgcccgtcgtcttgggcggcaggaggaagatgtagtccagcgtgaggtgccagtacctgcgatagcgagcagcgaaagggcgagtcaggagacgcgagcgaccgggtgacgaccggagaggggcgactgacggagtgtagctggtgtagcacggctctccgcgaccgatctcgagccactgctctgcctcggtcagtcgttcgccgagcgtcaggccctcgagccccttgcccttgccaaggacgctcgcctcctggtacagactccgtgggaccccccctgccttatccctggcagcgcgaaagacgtccgtcagctcggcgaccgaaagcaggccgtcctcggccgtcgcgagtcgggcattcttcatgatgccctcgccctcgccgccctcctcctcgccctcttcctcgccgtcgtcgtcctcagcctcggccgtcggaagggcggccggctttgagttgggcgggacgaactcgggcttgccggtcggcgggctcggctttcctgagcgcacgttggcgaccgacttgtggatgacggacgaattttcgagatcggccacctgcattgccgtcagctgccgcgaagggttgacgaggagcgtgtatgacggctcgaacggctgcgtattgaagtctgcaagaactccgcggtacgtgagatcagctcgggatgtgactcaacgatgggagagctaatccggacgcaccgccggccatgacaatcggccaggcctcccagccgccctgctggcgaaagcggagcgtctcgcgcagcaagacggcgacctggcgcgtccgttcagccagataaagagggtgccaaaacagatgggtcgtcacgacaatctgcgaagatagcgtgtcagcgcgagtttcgatcgagggtagaaggaagtcggatgcaccactccgccgctgcccgacctgttggcgagcgcgacgagcaacccgacgtttttcgtctcgcgcgtgccggcccgccgccaacgagcctcatcctcgcccccgccctctcggacctccgcctcgtcaaggtagacgacctcgctcgccgcctggtcgaagagcgtcgagcggtggaggacgacgaggccgtgccgcttgttgcggccgcggccttcggtcgccgtgaagtcggtcaaatgcggccgaagcgcaggcagctggtcaacctcctacggatcggtgagcgggcaaaaagacgagcatattttttcagctgagctgcgagtgctgcgagtgcggtcagggacgaacctgcaggcagatgacgtcggcgtcgtacgccgtcagctcggagatgagcatctgctctcgcgtcgcgaacttgaggcagtctaccgttgagaagtcagatgccgaagtccatgatggtcagcgaatcgtctgtggaagagctcgaggtggggggtcgtaccggagccggggaagaggtcgcggcctgtgggatcgacgaggcctcgagcgtcagtcgcgagacgatcattcctcacctggctggctctcgggcgaactgctactcacggacgagcgtctgggcaagcatctgcagagtcgatgacgtgcatgccaaggggcgtcagcacatccgccaaaggctaaaggtggcactcaggccgagggttgagctcccgggactcacgttccagctcatgaccttgatctttcgctcgccctcgcctgcctgtccatcgagcttgacccattcccgcttccggaactcgcccttagcgagctgctcggccgaccggagcggcttactgccctcggcctcgagcgcggccttcttcgcctgcttgagctgcgcgcgggcggcccgcttggctcgctgctcgggcgtgagctcgtagggcgccttcttacccgactgttgctgctgctgctgggccgcctttgcatcgggcttggaaggcgcggacgctgaagaggcgccggcggcggctggagtggacgacatgggcgagtgagagcggggcggagggctgagcagacgagtcggtcggcggagctgagagagggaaggttgcgccgaacggaggaggactgagcgggcaaatatcttgatgctgagtcttgcgagagcaagggagctgtctcgaggtgagagagtgggtaaagacggaagggctctaggctgcaggttcgagatggatgtcaagggcagcatgcggcgacgaccggcgggcgagattgcacaggccggccgatacgcaagcggtattcgagagattaggaaacgaatagcaggcccttctgacctcagcgctctgacaagtacgacgtgctcgagcaaggacagaaagaagggcaggcatcatatcgtagcgtcgtggcggagtgggtgggtgctggcttcccgcagcgggcgaccttccgtgcggctttgcagccggaggctgagtcgagtctgaagcccgagaaaacaactaggcgtgcagcagttgtgcagtcttagctttgctcgctctcgtccttgtggttgacctcgaggacgtggtagccgacgatgaggcccatggcgacgacgccgagcgagttctgtcggaggcaatgacgcgtcagccgggagtcgcctcaacacgaaacgacaaaggcagccgacggccaggactgacggccagcgtggtgagcgtggtgtccgagatcatggcggcggctttgctgcgagtcaaggtcgatgagagggacgatgctgcagatggccctcctgtcgacccgagctgtcctccgcgcgcgtctctcctcgccggcgccaggctcggccctgcaatttcagccgtcgcccgcagtaccgacgaccgacgagctgctccctccgaccagcaactcaaccagacacgacagcagcagccccgaccgcccaggaccgcccgacctctcctcccgccagcaacactcgaccccccttcttccactttacttcaacagcatgcggcctttgaccgaggaggagacgaaggccgtcttctcgagtgcgtcctcccttgccggctgcggctcaacctccgccagagctgatcgtacccgtcttccttcttgccctgacatcgcacagagctcgccaactacatcgtgcgcttaagcctcgcttctactagctttgactttagctgacacctgcttctttcccttgatgtagggtaagaacctcgtccacctcgttgaccggccggaaggcgaggagcactgcttcaggctgcacaaggaccggtgcgtccgacttgtggccggcgagctggcctagagggccacttaaacgatatgcgatctcatgcggccagctcggcagaggcgtcgcgaacataccgccggatagctcgggctgacgagctccccttcgcactacgtctgtctcgctcttcattcctcgtccacctgcgcgtcgctcctcggctccgtctcctgccgctcccgacaaccagggtttactacctgccgacaccgctgatgaagcagtcaatctcggtcgcccggccgaacctcatttcgctcggcacgtgcttcggtcgcttctccaagtcgggcaagttcaagctggccgtcacctcgctcgactacctggcgacgtacgctaaatttaaggtctggatcaagcccaacggcgagctccccttcctctacggcaaccatgtcgtcaaggcccacctcggccggatcaccgaggacacgcccgagcaccagggcgtcgtcgtcttttcgatgagcgacgtcccgctcggctttggcgtcactgctcggtcgacgatggacacgcgcaagctcgacccgacgtccatcatcgtcttccatcaggcgtgcgtcgcttcctttcgcctccgcttggctgcgccggtgtcgttggcgagcgtcggctctgcttcgcctagctctgagagagtagcgactgagcgagactgacgcccgaccttttctatcgccaatctgttcctcaccacagcgatgtcggagagtacctgcgcgacgaggtttgtctcctgttcccacctttcagtcacaccaggcctgcagaggactgacctcttgcttctccctcaaccgtttcgtgaccgatctgcaggagaccctattttaacgaccgcttctccttccttgccgccacttctatactcctgccttttcacgctttctggcccttctccggctcatctactcatgtgcgcactgcaatcgaaccctggaagagcgaatcggcacttgggctgcacgaaggacgttgagggcgtcctgcgacagcgcttgaggagttccgagccgggcgtcattgaggcgctttacagcagcctgggcaaaacgttccgcccacccggtcgacggccggcctacttcgcctccagcagcccgcatcgctcgtgtacagtcatgcctataagtcgtccgtcctgcctcacgggctctcgccgccgccttgcgacagtcgcttgaggttgacgccagcgttccgccaggcctcgggcaccttctcgatcaggtagtcgaccgcttttggcccacgctcatacacgagccggagggcggccgactgagtgccgttggtgaaggaccggcagtacgagctgaccatgtgcgagacggtgccggtcacgcgcgtcgatgcgcgcaggaccgaaagaagcggtgtgtggagcggcaacggctggacgagactgagtgagcgacagagccagggatgaagccgacgtcagccgaccgtcactaaatcaagcgagatacgaagttcggaaggagaacgtactcgacctggccggcggcccattcgccgaactgagggaagctgccggtcgggctccgaaactcgtcctcggcgagcctgcagcctcgcaacggctgcgagctgccctcgccctcgccatcgatgcagaaccggcggacggcctcctggccgctgacaaggacgatctctttgccctcggcccagcggatccagcgctcgacgccgcgccgctcgcgcttccactcgtccttggtcaggtcgcgcttgcgccagcaggccgcccggaaggcgagcgtgttgtcgtcttgcgaccggactggcggcggcgaatagggcgtgtaaggtacgaacgggtgatgagccggcggcggtggtagcgacgatgagagcagcaggcagcgcagcgtgagcgacggcagcggcggaggtggaggcgtcgacggcggctgagggttcgacgcctggtacggcgtcaggagggcctggaaaggatgcgtcggcgacgggtcggccgtcgatccagattgctgaaggtctgaggagggcaacaacgacgaggatgacgaggcctcagcattcggtcgtgctgactcgtctacaaccttcgactgctgctcgggcggcgtcatcctcgaggcgaggcgaggcaggcggaggtggagttgccgatcggggtcggcggatggtattcctgacgacgggccggttgagatacgtccaaggtagacgacgagcttagacgttgcgtaggaagaagaaagaagggcgagtggggcttgagcaggtgaatggagaaggtcaatgtcgggcgtcgggagcgatggctcggcgtgacccgagcgtcgagtcgtgccctccagcggccacccactctcttgcctcgccctccttccgcccgacatcgagcaggccctttccgacaggagcaggacgacagatctctcgagctcggacgaacatcggtccagtcgatcgaaggcgcagatccgatcatgcgcctcctgccgctcgccctcctcctcggcgggctcgccgccactgccaacgcccgcccacacgacctcgcctccacagcgcttgctcccaatctgcctgctggaccggccgggaccgactctggtggccagggctcgaccgcgaactgggtctcctggctcaccggctttggctggggcgaaggtgccctaaagctgctcgtacgtccagcgctcatgcctcctccgctgctgctctatggcgcgcatgcgagacggtgtcggcaggagtacccgaatccctccttcctccaaggctgacgctccgaccgcccgtcgtctgcttaggacccgaaaaccgtctttctcgaggaggcctcgtttgcaactcgctcggcctcattcacacctcggctcggcgcggtcgtcgctgcgccgcccggctccaaccagacggccttcaatgtaacgaatccctttgtgggctcgctcgtccccatcacctcgtttgccctgcccgacccgctcccgccgacctggaatgcgaccgtcaacatgcacgcttgcagcgcggcgtcgggccggcgaccacgacgaggcacctcgtcgactgacaacgacaagggcgtgctcgcgtcgcaccggcctcggagccgaacggcgctgcctatagcactcgctctgcgcggcgagtgttcgtttgccgccaaggtgcggctagcacaagctctcggcgctcgggctgtcatcgtcggcgacgaggcgctcgtcggcgagtcggacgccgaccagcggcggcgccaagacctgacgacgatgtttgcgccggcgaatgagagcgaggacctgctcatcccggctctctttgtctcgcgggcgacgtacctcgttctgctcgacgagcttgaggtctcgccgaacggcgccatcgccatccggctcgaacaagacactgagtgggagaatccgctgctcgatctcctgctcggcctcttgctcctcccgagcctgctcacggtcgcgacgctcggccttcatcaccttcgaacggcacggcagcggaggaaggagcgcgcgacgccaagcgcggtcgaagcgctcgaagtccggacctggcaggcggacggatgggagaaggaggacagcctgcggagcagcggcactagcgtcggcggcgacgatgagaccgacgaggacaacggcgcgacctcgagctcgtcggccgaccgcgactcgctccgacccccgccagcgaaccaccagcaggcagcccctgggtcgggccgccggccgttcggctcaccgcgcccggctgcgccccggcctggtgacagcgccgaccgcctgcagagcctcctccggtcgtcgagctcgcgcaccgacccgtcgtcatcgacatccgatcagcgtcaggtctcgccggccgacctccggccacggcacttctacaacacggccgagtgtgcaatctgcctcgacccgttcaaaaagggcgaccaggtccggatcctgccgtgcggccacctgttccacgtcgacgaggtcgaccagtggctcaagggctggaagaaggtctgcccggtctgcaaggccgacatcaccaagcctcaggcgccgaggcgcaagcgggacgcacggcggtcagcgctggcgccatcttcgacggctgccgccgttgagacgaccccgctcctggcgcccgctgcggtcgatattgagggcgactcggcacctcgcgcatcctccccggcgacagaatatggagcgactgacgcgggcccgtcgaccccttccgcaacctgatcagccctccggcgcaaccgcatcccgacctccagcactggctctccgattgccccccacacccacactctggccattttcctacccgttgtaacgatgtaacgatctctcgatgacctttaatctctgctgtcgctcgctagagtgggccatggatctctttcctcgcagcctccatcaggccccacgcctcgtcctcatcgtcgggcaattccgtcaacggctcctgcgccttgctttcggttgccgggtcttcgccaaaacccttggccgacacgctgttggccggcgcacccgtgatcaggctgtcggcgaagccgatgatgtcggacgggacgagcgagctgttgctcgcgtccgctcggcgctgacgctcgtgctcccggatctgggccgccgttggctggtcgcccttgagtgatgatggggcagcggcttgtggcgacaatgccggcttgattgcagcctccataagcttagcgggcgaggtgagaggcggcagctgtggtggcgcaggggcggcgattggagtcgggttctcgacgatgcgcagggcggccagcacgtctgctgctgtcgacggtgacggttccggcgcgaccggcgacttgggccgaaggtctccgaccggcggctctaatgaacctgagagaatggcgtctgaagccggcgcatcatcctgcgtggtctcttcgatctcctcgaggagcttccagcggccgacacgaacctcgtccgcctcgccgtcctcccaaagcccatcgccaaaagcgccctcgacccgggcgacccattcggccctcctccgacactctgagctgcagaagccgtcgtcgtcgttgcctgtgacgttgatcacgagccgtgtgttgtttgggccagagacgatgcgtgacctcgggatcgggtatgcccggtacggccgacggggagggcgggcgcatagcgggtacgcgcagaggtctgacagatgacgctcgtgcaggatgtgaaggtatgtcgtccggatcaggtgagcgcactgcgagatcgtgtgtggaccggctcgatcagcgtcagggagcggccgacgggtcgaggacgacactcaccgccatcttgaagtcggcccggctgatctcgtcctcgagcaatgactcggtccattcaagtgcccgcttctgaagctcgacctttttgatgtagctctgtcggctcaggaccaggtcagcatctctcgattctgacagtgagcaggcaagagggacgcacctcgcgcacggcagcggcgtcagccccgcgcgaggtcgagcccgagcccgccgaggcctccttgacgaggaacgcctgcggctcacgaagcgtgtggacaggcactggacgtggcctgaaactgcttgcggcgttgttgaacaagtccatgagaaggttgaggatccaccacgctctggccggccgtcgtcgtcgccgtcgtcgtctgggtcggaggaggccggctcgcccttggctccccttttctattcttttctcccagcttcgcgcccgacgcgcgaatcggctgcacgaccttcgcctcttcgacggtatcgttgtccaccactttccggctccggcaattcgcagatcaaggtcgagggacggaccttatcgcgcactcagccatcgctttgcgatgctccaggctcgcgcccatcttcagagcacttcagcccgggcgctccgccgccccgcagccgtcgggtgctcgtcctcgtccgaggtacgtcgtcgccctgtctcgactggatcggctgcgatcactttccagcacatcattgacccagaatgtgcccactcttgacagccgaccgttccgactcggactctcgcgctcggccgagctcagtggcgctgggaggagccgcaggtggcccgcctccagtggtcgatcgtgcagctgcccatcggtgcgtattcgcttgggcgcgcgtgcggcactcacccttacccgccagtaaggctgactttgacttgccctcacaatagcactaggcctggccgaccctgcaggacctcgatcgtgggcagaaagtcgtcgatatacctcgaccgatcaggcaaaaccgccaccacggccgcaggcgccgcaggcgagcgtcctccctttagaagtcatcggtccgccgcctcgaagtttgtcatccgcgcccatgacgccgccgccgccactggctgcctcgtatccgccacaacgaccgcaaggagccgaacaggccaagcccctgccgcccgtcttcccggtaccaactggcacgcaaggcatgccgccgtcgcgctccgccgccgctgcgctcgagctgtcgtcactcgtcgaccctaatctaccgcctatagaggacgcaagcgaagtcgactctttaaagacggccgttgaagcccggcaacccgtcgcgctgccttcgacatccggagactctgggcctcgccccggtcagcgccctgctgttcacccggcgtcattctttggccctcaacgagaccgatatcctgtccgaatatcagcgccacctcagcttccccccgtcgttcccttcaactcgctcatcctgcatgctgccatgccctggttgaacgctcggcagcgcttcgcaaagcccaccgagggcctcaccccgctctttccgagctccggctatgcctcgctcccgcgcagccctcgcggccgctggctctcgcgcgagtcttcaagcgggcgagggcgcgagcccaggacgctcgacgggcagcgacatcagcctgcgaagcagttcggcgtcgcagcggcgcgagcagagatcgccagtgctgccggtcttggccttggtcgcgcgacaaatgcgacttcgactgccaccgacctcgtcaatgagtcgatggaggtcatgtccttccccgcgctgccggcgccctacctccggccggacgctgaaccgcaaccggccggccgctcgccagctgagcaaaagctcacgggcgagctctcgcgccgcctcaccgatcatgcgatccgcgtcaactgcgtcgcctttcggatcgaggaggcgctcgagctcttttctcacgcctaccccggttggctgccttggagtccagagccgagccggccagggcctgcagcggccgacgtcgacgagcgcgtgctctatagcctgtcggacggactcgtaaagacgggcaatgcgacccgtgcagcgagcttccttgaacacgcgaggaagcttctcggcggcaagctctcggctgccttctaccacgcccgcatgcgtgttgaagtcggccaaaaggccttcactgctgcccaagacctgtacaagacgctggccaactatccgggcgagccgctcaacgaccggtacttcggcccggcggtcatgcagacgttgatgcgcatcggcaagctcaccgacaaccccagcctgactctgtactggctcaagaaggcgcagacggagcacggcatccagccgggcttccgcgagctgcgcgagcttcttgacgcctttgccaagattcgcgatgcagccgccgtcgcctccgtttggaaggtggtccagacgctcccggtccggacgtcggccgagcaccggctctacaccctcatgttcgatacgtgcctccggctgtatgcggcgtctggcagtggcgcctcgtacgctcacgtctcgttctttgtcgcccaagcgatcgcctctggcaagctcgcgccgacgcccgacacgtttgcgaccgtcatgcgcgtcgccgctgaggaggagaactacgtcgctgcgcgcgacattctgcgcacgatggagtctggcgagctcaacggccaggcgtttccggccgaggccaagcacttcgaggcgctgctggtcgcgctcgaccggcagctgccgcatgttcgcaaggctgccctagcaactgctctcgaaggcgatgccgcacagcagtcgctgtcgatcgccgaaagcgccgacgctcggactagggacgaccaggcggccgagttcgtcctcgagcgcgccctcgagctcgtactcgagatgaaacagcgtgacctcccgctctctggcagcctcctcgtccgcctcacacgtatgctctcctaccgggccaagagtcggcccgaggcaattcggctcgccatgtcgctccttgcctcgcttccgcagccgggtgagagctggtcggcccgcaatatctgggcgatgatcggtggtggtgccgacggcttcggaggcaccacttctgcctcgcgcgtcttctcggctttcatccagacgctctcggcgacgcgcgaggtcgacaagtacaagacggcactcatagcgttcgaccactttctccagctgcgcgggcccgacgagttctccgtcgtcgacgcagctcgtatgctttcgcttgcgggtcgggccgacgagacgcagtacatcgagcggctctgggagctcgcgatcaagcgcgcgatcgcctcgagagaagtcgtcgaccctcccgaggatgacgaacttccttcggacgccgagcagtctgcccctcggctcagcgagctgaggccggatggcggaacctcgttcctcgacgacctcggcatctcgcttccggagcgcccgtcgacagtgccgtttgtcgagcacctcggaccggcgatggagacgctcttccaggtcgtcaaccggcaccttacgcccgaatcgcttctctatcttgagaaggagtggctgcgagtctaccagctcggctttggctttgacgctgcgtgctggtgccagctcgcgcaggcctacctcggcgccggccggtacgagcgcggcttccagatcctcaacgacgtcgtcctctttcggcacaatcagctgctagccgactttgaacgcgctcatggcggcttgacggtcccgtacgcgccctcgctcgccagcgagcaggacgggttgacgagccttctcagcgacgagatccaacgcgcgccgccgcactaccaggacatggtcgccaagtcgtactcgccactggccagtccggagggctcaatggcccggcagaagctcatcaggtccctcacaacatgccggcacctctacggtcggccgcaggcgcctacaggaggcatgtctccgacggagccgctgtcgatcgctatcaaacaggccgcgctgaatcgccagacgctcatggcggtcgcccgagccgtctcttgggcccccggagggatcctccgctccgtcgaggaggcccagcgcaagatccgagcggaggccctccgccagtggcacgaggatcctcccgagctcaacggcgagaacacgcttcagcgggccgagcgcttcttcgccaactatccgcgtatcgcccaggtgctcgccatccgagaggcgcgcgatacaaaagaggaacatgcgatcgactaggccacatagagtcaggccatccgatcagtcagaccgttccctctgcttccatcggagaacgctcgctgacggccgtgctctatcgcagatccaaccccattctcttgcgtccacgccagccgtctgcgacagatctcggcgggcgtcaacttgcgacgtcggccgcctgttgtcgcactcgcctgttgtcgatcacacgccctttcgcggcggctgtcgcgccctgcaaaagtgcgatcggcatcgatcagcagatcgcgcttggcttgcggtctgctgccctacggactgcacgcccaaccatcagccttatgcctgcccttagaggaccgatcaacttggtcttttcttctttctcacgacttgacgccccctaacatacacccgaatctcctcgcacctcatcgcattgacctcgcacttctgctctgtcgcaccctgcacgccctcacctgcattacacctctccttgaatctttatgcccccgccacctcgcattgaccagtcgactgcctgttcatctttgaaccctgccggcgtgcatggccacgacgctatgtgtctcggcaggttccgtgcgtcggagcctcgcacccctcagtcgcccatctttgcccggtcgctcgactaccgcccgcttctgctttctactcgtcctgcgcaagaccgcccggcgctctcttgtacgtgtcggggtcgctccccgaagtacggctgtcctgccgctagccgacgagacgaaaggctgaccacgcctccctgtccctgcctcctcgcctcgccttgcctctccatctgcgcgcccctcgcctcgttgctcgcctcgctctcctgtcccaactggatgcaacgcccgctcgcagtcctcttctctctcgcgctcggtcgcctttcatcagctggacgtctcctcgactggaacgctaatctcccaatccaccaacgcctttaaaccggcggccgcccgatcagcctgcgctcttcgcttccgacatcgctttctccactccatcgccgatcagacccttccctctcgcaaccgagtccggcactcgctcctacccttcatcaggaagtcatctcaccgacggtccgtgatcagccgctccaatcacaagaaagcgtacgttcctgcgattcgcccggctgaccgagctcgagccgactttgaggcccgccttcgtgttgaaatgatcgctgatcttgcctacatcccctctcacgcctctagtccgctaacttcatctcgaaagcccgacatggcatcttccccttcgccttcggccccccggcggtcgccttcgccttcccttcttcctcctccgtcgagcgccaacctccctccgcggccctccacctcgacgaccgcccacgtcccctactcgcgccagtcgctcggaccgggcggccctcagaacgcgactcacatccccggcggcggtggtggtggcggcaacgtgcctgtcggcacccgcatcgtcagcggccctcccggcagcggtcgtccgaacgccggtcgcccgtcgagcgagatcctcggcggcaatggccagcacggcctcctgagcggtttcaaccccaagacggtcgacctccagagcccggaaggtgcgacgaccttctgtgcaccagcgcgctgcccgtatcggctcccgctgactccgaatcggccgcctgacgtcttacactctctgcagccgaggcgatcgacaagtggttccaggacctggcgtcctacgaggttactcttgtgcgtcgtgcttgcggaccgcagggcgtaagaggctgtcgctgaaccatctgttccgcgttggtaggaggagatggccgccgcttcgctcgaccagaattttaccgaggagctgagcgcgatcgagcagtgtgcgtccctcctgccgcgcgcgtctctatcgactcgtctcgctgaccagaagttgtttgcacctgaagggttccgcgttctctccgaggccgagcggacggccgctctctactcgctcctccagcattcgacccaggtccagattcgctttttcatgaccgtcctccagcagatggctggcatcgactcaatgtcggccctcatgtcgcccgccgtcggcggcggtggccacggtatgcaggctcagatggaggccaagctcgctggtctgcgttcgccagtcgccgctcgccaaagctttggcgcctcgaaccgcgactcctttggcggcggcggcggtggtggtcccgacagcgccaactatctcaacccagacacggcctttgactcctcggccgccggcaaggctaaagccaacaaggcgagcaaccgaacgtcggccccaggcctcttgaacgccgtcacgccgtcctggggtgcggccaactcgcagctcgaccaggtgcttgagcgcggtccgtcaccgggcgccgaatccaacatgtccggccggtccggtggcgagccgcgccccaagagtaccgacttctcgggtcacgccaacgtcgttcccggctcggcctcgtaccccaagtcgccccagggcaacagcaacgtcaaccgagcagacgacctcggctcgctcccgctcagccccaacgtgacgaccggcaactgggcgagcatggtcaacacgcccgccgtcccaatgtttggcgccgtcaacaaccagaccgcctcgaatctctccggcgtcaacgaccacccggccttctcggtcccgaagctctctgacgcgcccaagcgccggacgagcggcaagatgggccccgcgggactctcgagccccggcagcctcggtggcggcttccagggctcagctggcgcctggagcgctcagcgcagcccggcgcccggagcgacggacggtggctttggcaacaactacggcctcggcctcggcagtgccggcgccggtggctacaatggaatcggctcgccctcgccctcggaccttgcgctccagatgtcgcagcttcagctccagcagctgcagatccagcagcttcagcagctccagcagctcggcgtcgccggcgccgccaacggtctcggcatggggctcggcatgccaatgggtctcggcatgggcttgcccggcctacctggcggtcctggcgcagcatacaacaaccttggcgcaggcgctgggtcgcgcaacgtctcgaaccggagcataagctcggcctcgaatggcggtgcccggcgcagcccgatgctcaacagcggcggctttggtgcaggcgccattgcaaaaagcccatcgcctgtcggtcgccgcgacagcgctggcactggcggcaacggcggcggcggtggtggtgtcgaaaacgaggacgtcgacatccgcgtcctcgaggatgtctcgcagtggttgcgtacgctccggcttcacgtcagtcagcctttcgctttgccgtccctctccccagtcgactgacctgcccttgacttctccttcttgcctacaagaaatacacgaccaatttcgagaccgtcaagtggcgcgacatggttgtcatgaccgactcgggtctccaggctcagggcgttgccgcgctcggcgcccggaggaagctcctcaaggtgcgtctctcttccgcacatgcgtcggtcgccgataaacaagactaacacgtccgcgatatgctcgatctcgacagacatttgagcacgtccgcaagcagtacggcatccccgagccggccgacgagggcaagccggtcgaccacggcgcgtcgtccgacggcgacgaggacaactagcttctgcgcctgatcgaccgacgctctcgaaccagatctttctctcgctctacggtccgggctagctcgcgatcgcgtccactccttcgtcgccctctttcctgctcaagattgtcgcgacgtcttccgtcgctcgacctggctttggctggcgtgtctgtggcagcagcccagcctgtcgtccaatcccgtgtagctttcatcctcctttttgcttcccctcttccgctacttgattatgcactctcgcgccctggtcagcaccctcctatgcagcaggaaacccgacgacttggcactgctagcagacggacccgggtcggccagcaggcttctgctgacgcgcgtcgtcagtcgctccgccgcgaaagacaggcgcgcccagccgcgtcgtttctctcccctctccgactgccacaagcctccctcccctccgttccgcctcttcttctgtcggcctctgcgccagccaggtccccggtcgacctcgcttgcctgcctttgggtcaatctgcccgagcggtcgcgcaaccaggtccccggcccacttcatcgccgccatcgccgacacagcgcgccaggtcgaaggctaaaggctccctctcgcccccgccgccttccctcaacgagctcgagtcgccacctatccccgcccttcccccttctcttcgacccatccatccagcggcctgccccgtctcgtcgctcgagctccggccgcgaacaagggcattcggcctctccgctaagggcagcaggtcgagtcaaccagcacaaggcagccgttccctcggtcgcttgtttgtggacccctgtctatcggccagcagtcccggtccgccacctggtaagtctcgcttgacacctctcattccgctagcctgaggtcgctctctttccttgttgcacaggagctgaagaccgactcatcctgatcgtccggccgctcagcagcaaatgggcttcttcgccgacgcgcagtcggccgccaattcgaagccgaccagcctcagccggtcgtcgacaatgtcgagcgacaccgtcggcacctcgtcgtcctcgtcgctcgcgaccatcccgtcgtcctcttcttcgtcctctcttcgggccttcttcgccgcgccgaaggagtactgggcgccgtccgtcgtttacccgagctccggtcggggcaagagcgtccgcgatgccaagctagctgctgccgcaaatgtggaggtcagcagcggcggtcgcgactctagcgagattcttcgcccgcccgccagcttcagcatgcgcaagagagccaactcggctgccgcacttattccgccgctctgggtcgcgccgcccctgccgcccctctcgcgcgagctactcgtcgacgacaacctgacaatcggccgacgttcacgcagaggctcgtcagaagacagcgacatcgcctacgtcggcttcacccgcgaacaccgtcggtcacgttcggcgacgccgaccgaccgtaaccgccggccgccctcgccaaagcttgcctccggcaaggtcctctccccgcttcccgaactcaccggcggctcgggcaagtcgaccatgctcgccgccatggagtcgtcgcgccgatcgccgaccaagatgatgcgcagcccgcacctggcgacgatcaacttactcgagcacgctgtggagagcgatgaagaggctttcgagacgtcctcggccggcggtagcgggggcagtggcgatctgcactttgcgctcggctcggacaaccaaagctcgctctcgctcagttcggcgggcagcggcgagcggaccggcccactagtgcgctccctccagggccgtcgacctatcctccgcacgcagacggacgcgtgcatcacgacgcgaccattgccgacacgcaggtgtcctcagtctgtggagacaatcaagatcgattttccgagtattttgcccgaggtagatcggcagctaccaccactgccaccgcctacgacgttccggccgaggtcgcgcaggaccctctcgctcccctttgcgccaaatctgccggcgccaaaggccgctggtccgatgcttccgccaccccggccggctcctcgcctacggtcgccctttgccgtgccggccagcgtcctcaaggcgccgacagtctcgacctcggtctcgacgtcgcccagcatgggcagcctgtcgactttctcttcgtgggacttccccgtcgccgccgatgccgcgtcggtcgtcggccggcatcgggtgctttcacatctcgaatcgtacaacctgccgcagccgagcgtcagcgccgctcggccgctgccgacggtggttcggcctcgtctcacaagctcgccgtcgtcctacagctcgctgtcgccgccgacggccgcaaggctgcgcatggagcgctcccacacgcaacctctcgtttcatcacgactctcgcagaccggcgctggctcgccggcctcgtcctcgggctcacagccgtcctctctccggcgcgcgaccacgatcgcccataaccggccgttacaatcgattgatacccctcagtcgacggcgcagggctctccacacttgtgctatcccaccgccggccttcctcaggccaccgccggtcaccgcatccagaagatgccgaagctgcggatgcctacgtcgtattccctgcaaaactgccgcgaggtcccgcccgcaccggccgggccactctcgccctccagctcaatggacggtctctcgctcgtacgcacgcgctcgagggacaggcgcggctcggtctcgagctcgggctcggtccgtgacggctatcgcttccctgggccgacgccgcctgcggaagccgcagcaacctcgagcggcatggcgcgctcctcgagcgctgtttccctggccggtctcatcaactttggtcggcggccgagcgtcaaagacccggccatcgtccgcgcgcagcaagaagagctcgcgcgcaaggcagccgtcgccgccgctcttcaggcagaggaggacgactcggacgacgacgcgccttacctctcctaccggaccatgtaaccgcattcgccccttccttttccgtttacgcttctcctcacgctcggattcgttcgctcccgccctgaccctgacgacacaccctccccgctctgctgcacgtgtagacctagtatcaatccccatccctcttcggctcgactctcccacgtccctctcgcgtgcttcgtttgcctgctcccttcgcccgccttcccttcgcgcccctagtccgctgcccttgtctcatgcctgctcatgacccttacctttgcctgtcttgcaatcgcactgagccgctgcacatgcatcagaccgcctagctaccgacgtcgtcccgccggtcgcggccctcccaaggtcgaccgccgttccgctcaagctcccactcgcgcagctcgtcctcatcccacttcttgccgtgcgtgctgccttctggcttgaggaagcgcttgccgacgtcggatgcgaacgacgagtgttcgctaagggccggcggcaggaaagtgttggccactggatgggcgtacgagggctcgtaagcgtagcctttgccgtggccgagatccttcgccagctgggtcgggacgttgcgaatgttgatcgggacctcgtactgctccttgccttcgcacgcgcgtaccgcctgagagacgaccgatggatcagcgtcgactggcgtttggcaggagatacagtagcacgtacctcaccgtacgcaacgtacgctcgcgttgacttcggcgcctcggctagataggcgacgagatgcgcgagattcaggcggcactcgggcatgccgacgtactgacacgccgccagcgccgccgtcgccaggggcagcgcatggttgtcggccagcccgacgtcttcactggcgacgacaatcaggcgccggcagatgtagagagggtcttcgcctgcaggacaacatcgactttttgctcaataaggccctctgtaggtggtgtcaaaaagccggtacttaccggccgtcagcatccgtgccagccagtacattgcgctcgagccgtcgctccctcgcagactcttgtgtagagccgagatcatctcgtatcgcgagtcgcccgttcggtcatagcgtaggctgagtgtgcccttgagcgcttcgcggagctgagcacgttcggccgcggtgagcgggttcgttcgggcaggcgggccgacgaagagctgctcgatgaggccaagggcggtctcgagcgagttgagggcgacccttcaggcgaaacgtagacttgaatcagtcgcccgcttgagccagcgcacgtagtgacgacgagtcgttgcgcgtacctgcagtcgccgtctgccacaccagcgaggaaagccaccatgccggagtccatgcccggcacatcctcgtcatcttctgctactgctggaggcttgagccaggccgtgtctggctgctcggccttccagacatggatgccccgacgaaggacggaggtgagcgcgtcggtcgtgagcttctcgagcgcaaagatcttcatgcgcgagaggagcgcccgattgatctgcgcaggagggagtcgggtcagcagtgtatgagagagagagcaatgctggattctggaactgacagtgaaagccgggttctcgctcgtcgctccgacgagctgaattgttccgctctcaaccgagggcagaaagacgtcgagctgcgactttgtaaagcgatggagctcgtcgacaaagagcgtcgtccgtcggccagtcagtcggagctgattgactgcgccgtcgagaatcttgcggacgtcggtgaccgaggcttgggtcgcgctgatggcgtggtaggacgactcggagtgaacggcaatcaggccggcgagcgtcgtcttgcccgtcccgggcggaccccagagcagcgccgagccgagcgtgttggagaggatgagggcacgcagcgcgccaccgccgcccgagattgcgggagccaggaggccttcgtggccgcaaaagtcctcgagtgtctttggccggagccgctcagcaagcggctgagcatttcggagtgcggcgctcgcccccgtcagccgagctcgcttggctgaaccgccgccgctgctgctgttgctgagtgcaggggcctcgacttgtccgcccggctgggtccggcgcttggctgacgtcctctcggcgctcgccggagctgctgtcgatgaggaagggccagctgcagcaggtgtcgtgaagagcggcgcgagaggcgtcgacgggcctggtcgggcggtcgagagcgtgccggtcgaggtgctggtcgccttgccgagcttgcagcccgagtcgatgtgatcgttgatggtccgctcgtccgcccagttgtcgcagacggggcacagcacgagggcgctcataagggtgcgtgtcgaaggtgatggtcgggagatcgaaggaggaggtcgaggctcgctgcgcgtcggtgagctcgacgacgcgccgctcaaacgccaaggaggccgtcatggctctcgtacattaagcctgctgaaagtcgatcaggaggcagcagtatgatattgaacagcagctcgatgccgtccttgatggtcaaagaggtgctgagggtgctctctcctctgcagcccaggcaagcgcgtcactctcgccccgcccgacgcgcgagctgcgactgtggccagacgagctcgtcctcctgccagcaaacgatcacaacttccaccatctccagcatcacccgtcgatcgtgagtgcatcgcgcccgccagtatcgtcgattgtgcgtctgccatcccttctaaccgggccctgaccttgggccttctcgctgcagtcgcttctcgaagcttcgaccttccctagccccttgaccgacctcgatcggtcagcatcgaacttcccctcacgcaccgacctcccagcatcgacttcgagcagcacttcgtacggttctcagcatcagcggaagctcagccggctatcatgtcctccccacgccactcggccgacgaggcacatcccgacccgccttccccatcgcctccgccgccgccgccgtcaccaaccgctggccctacaccggcggacgtcgccggctcctcgacctctcagtcatcggtcggccatgtcggctcaacgtccggccggtcgcgcttctacgacgccctcaggcgtatcggcttcccacatccgccagtaccgccgccagcgccaccggtcgagacggcgaccgcctccgagagtgacaatgatgcgttgtcgtcgtcgcgcacggccgcagcgcccgacccggccggcatcagtagcggcggtgcgagcgagagtccagcgacgacgactgccccgacccaacagaacagcagctctgggcccgaggtgccgtccgtatcgatggtcgatggagccgccgtccctcctgctccagagttgacgctggccccggaatctcaacccactgctggctcggatggcagcctagctcagggcactccacctcctaccagcgcaccgtccgccgatatgcccttcttgggccttgacagtcagtagcagttccagccggtctcttaaatctgtccctcactgacgatacctttaccacccagttatgcttgacgccaacggtggccctccgccgaccagggacgagatggagacgctgatgcgcagtcttttcggcccgaacgtacgtccgtcgtgcccattgctggttttgactgagattgagtctgacactgtcgacactctgccttgcaggtggtcatgccgccgcaaccgatcgggccgaccctcgtcggtggccagacggcggtcccatcaattcaggcgataccgccggccggcatgtttgctggcacaggctcgcagccgaccggtgcagacaccagggagcagactgggagcgacaatggccaagttcctgtcgcaccaaccccgttggccgccaatgtacagccagagggcgatggcgctgtcccggttgcccatcaagacggcttgccagcgccggcaggcaaccgaccgccccctgcgccaggcgcgctcggtcaactcatcaaccagttcattagccaactcgtcgcccaacatcggacggcgaccgccggtaccggcgcgccctcgatcgggaccatgccaatgatcatctcgtttacctttgggtcgccgggcgcgatggcccgcgggctcaacgacgacaaggtgcccgatcccgaacgggcagaagagctcctgagcgcgctctcgcgccccagtgccgagcttatcgagcggctcgatcacgccctacgctgcgaggaagccgtacgtccaggcggtgctcaagtcaactctgccggttggctgaccccttctttgcatttgctttgcaggacgctggtgtcgagactatggagcagagcggcgccaactgctcggtgtgcatggaaacgctgctgcctccggctgccggcacggtcggctcagacggcgccgacggtgaggtcgtctcgctcccctgcggccacgccttccacgattcttgccttcggccttggcttgagacaaataccaactgcccgtcgtgccggttcgacctcgatccgctgtcgacgacccttcggcctcaccggcagacgcccggccgtgcgacggctgcgccttcgccttccccggctgaggcgggcgcgatccctgctgcctcgggtgcgaatgcccagggccgcggccacccttactcgcgcccacttacccggcccggaactccaacggccgtcccccctcggtctgcctcagcgccgccgcagccccagccgccgcgacggtatgtccttccgcctggccggcagacgctgctcgagcgtgtcattcatctcgagagggcgcatcatatccggtgctcgctcgcgctctgttcgcacgccgacccggacctaccctcacccgaacggcggacgatcgccctcgccgtcggcacccagcccggcccggacggcttcgtctggcttgcttgcgagcaccgcttccatcccgactgtctccgcgtcgcctgccgcgtccgtggcgaccgcgagatcgtcgatgcgaccggccgccggctcgtcggctgcgacgtcaagggctgccatggcgagggctgggtcgaggcggccgactgggaggacgacgcagacatggtccgttcggcttgatccgttcagcgtgcctactgctgatgctaacgctcatcgtctgcttttgtctacagatcgacgaggtcgcgacccagtccaacactgccctcccgtcagtaacctcagtcatggaggtcgacgccgcctgaagcacgttcgttcgacgtagccttcttccgtccgccggctgaatgaccggcccagcactccacacaacacacagatctctctcgctccatctcacgacaccttcgcaacccttcactcgcacatgcagcatcgcctcctcttttcccttgcaattacctactgtagcttatagaccacccctcgcccgtcacctgcaccctcaccgcaccttcaccctcacgacgcttcatccatcatgccttcttgacccttgactgggctgaccgtaggcagtggaaggatctacctggaaggatctacctgcctgacctgcctaggccctgccatcaatcgcggcgccatgcttgacgcaggtgctgcggcgtcgcgcggctcgtcggagcgcgacgcacagaggctcgtgacgacgacgacggacggccacgtctctccgaccggacccaccatctctcgccctcttccttaccatggccttcgaaggcgctcctctgggtcgcgtcctgtccggcgtgccacacaggtcggccatggacgagtgggtcgtcgttgagcccggcacagagggcgaccttgcggatcgacctcagccggagccgtccggcgagctcgctgacgaagagcagcgaccgacgaccgtcagctcggcctcgctgccacctgccctcgaccttgacgccctcggaccttcagcgccagacggcacacctggggtctctgcgagcgcggtccgcctggaaccggaggagggcgccatagggagcgcgtcgtcggccgaccggcaccccatcctgcccccgccagccgcggtcgtccacctcgacggccagctccagccgagcgcagacgaaggccgagccagccgcagaccttctgctggctcgagtgtctcgagcgatggtgctggctctaccgccgtgagcgagctggcggtcgtgccgcggacgctggccgagggcgtgcccatgctcaaggtcagcgcgaagaaggtccagcagcggacgttccatctcgacgccgacaagggtacgctcgagtgggagagcaagcgaggcgggaccagtaagtaggccatctttccctccccctgcttgaggcaagagctgaccagccgagatgccctcctcgcagtcaacattgagagcatccgcgaactgcgcttcaccgactcggcccgctcgttcatggagaccttcaaccttgcctcgtcgctctcggcccgctggatcaccatcatctacacctgcagtgctccgacctcgcgcctgtcgtcatcttcgccgggaaccttatcgccgagtttcctgtcttcggccggcttcctggcgacgactccatcgaccccaaagtggaaggcgctgcacatggtcgccctctcggacgagtcgttcgctgagtgggcgcgggcccttcagagcgtctgggatgctcgtcgcgagctgatggccggtattggcggcctgggcgtcggcaacggcgcggccggtgatgccgtcgaggagcgccgaaaggcggcctggatgcgcaagcagtggcgcgaggccgaggtcaagggcgagcttcttaagggtgactaccaaaaatctcaagaggctgagcgcgagggttggctcgattttgagggcgtcctccgcgtctgtcgccggctcaatgtagctagtagccgcaaggatctcaaggcgcgcttccaggtcagtccagctcaatggtcatccttgtgagagtccctccactgatgcgagtcctcctccctcatctagaccgccgacggaaatcacaacggccggctcgactttgtcgaattccaactctttgtgcgcgagctgaagaagcggaccgagatcgacgagctctttgcccgcagcaagtcagccgacgctctcaccgcccaggagtttgagcgcttcatgcttgacgtccagaaggtgcgtccgacgctgactggagagctcattccatgattgactctcccctgctcttttttaccgacccagtcgcccctctcgcgcgaggacattttccggacgttcacccgctactcgacgtcctcccgacgggcctttccccaggtatcgaccagtccggtacccaacccaccgccgtctcccggaccgcggctcatgcacgccgaaggcttcagtgccttcctcctctcggccgacaatggcgtctcgtccgactcggccgctatggttacgcacgacatgacgcagcctctatccgaatactacatatcaagctcgcacaatacgtacctcgtcggtcaccagcttatcggcgacagcacggtcgagggctacattcgagctttgctccagggttgccggagtgtcgagcgtgcgtcccgccctcacgcttgacagcggaacccttctcgctgaccgagttcttgcccgccagtggactgctgggatggcgacactgagcccgtgatctaccacggtcggacgttgacgagcaagatctcggttcgcgaggtgctccatgcgatcggcaagtacgcctttgtcgcctcgccgttcccgatcatcctgtcgatggaggtgcactgctgcgtcgagcagcaggacctgctggcccagatcattgtcgatgtcctcggctcgacctttctcagcgcgcctctcgccgaatacgatgcggccgagacgctgccgagtccgagccagctccagtacaagatcctgctgaaggtgcgaggcggcgacttgctctcgggtttgcaccgggagctaacgatggcttgcttctcgctactcaggccaagatcccggtcatctcgggccagcaggccgatgaggttctcgacctgtcgtcgaccgacaccgactcgagtagcgcaagctcggtctcgtctggcgtctctggctcagcgtcggccaagccgccaaagggcccaaagttcaagttttctccggcgctcgccaaactactcgtctacacgatcggcgtcaagtatcgcggcttcaacaagaaggaggtctacccggcctcgaacatgatctcgctctcggaacgaacagccaacaaggtcctcaagcagggccttggcgacgtcatcaagcacaaccgctcgcacttgatgcggctctacccgaatgtgacgcgcctaacgagcagcaactacgagccgacgcgctactgggcgagtggggctcagcttgtgtcgatcaattggcagagcacaggtgcgtccttcgacctctcgtcgtgtttcagaacgtttctgtgaccgttcattcgcatcgcagactcggggttcggccttaacggcgccatgttcgcccgcaacggccgtagcggctatgttcttaagccggtcaacctccgtgtcaaaaacaaggaggcgcaaaacacggccgagagccgggagctgcacattagggtgcgaccccacagcttctcgctgccattcacatgtgaggccacaagctgacacgtcccctggccggtctccacttccgtaggtgatctctggccagcaactccccgtcctgaccaaggccgacaaggagccctcaatggacacctttgtcgaagtcaccctcttctaccccgacctcctgcccggcgggtcggtaccgacggcgctcgccaagtcgtcggtcaagatgcgcacccggaccgtcgacgacaacggcttcaacccgctctgggacggccggtttgtttttcccttcacggtcgcggccgatctgctcgacctcgtctttgtccgtttcgacgtacgctgcgaaggccggctcgtcgacgcacacgataaatcgatcggctcctactgcatctcgctcggctgcctcaaccaaggtccgttccatctgttcctccttcggtgacactagactgatctccttgtgtacgacgacaggctaccgacacctcccccttcttgactcgcacctcaatcaactcctcttctcctcgatcttcgttcacactctccttgtctaagccagcctctgcgctgttcttggcacccttcccttcacacactgcatcaccctgacgagccctctacgactgcttttgacgacacgctctgttgcgacgcctcatccagttggatgttcatgccattctcacacccgtgacgggacggcgacccagccctcgccaatcttgtagacctctccgccgatgagacactcggcgaccttgccagcggcgtcggtgacaagggtgccggtcagcttggccgcccggcccatctcagcgccctgggcgatcgggtaggtcgtccgggacgtgggttgggaagatgtgagaccgagggcgtgaagaaccggtccgaggctggcgagtgaagggacatagagactagtcagctcttcggcgacgacattgcaagtggagaccagggagtacgcacgcgacacccgccgagccggtcgccgagtcttcgggctggaacggcaagagcacccgagcgtgcacgcgcgtctcctcttcgcccttttgctcggcaaagaagacgctcagaccgcagacgggcgcaccggcatcgatttcaccgagcgaggcgatgagcgcagcgacgcctgacattgacggcctgaggtcgatgacgtcctgctcgttcctcagccgcacgtacgcgaacggcaggccgcaagacgagacgtaagcatcaaggccatccgtttgagccggttcgagcgatagcgcttcggccaggacgcccggctggagatggagcggcgacgagaggaacttctgcggcgcactgagcgagatctggctcgcgtcgggcgaggcggtgaccttgataggtccggcgaggcacgactggacgatgggaccgtcgttgcagacgagaccgcgcgagataagcgtcgaagccgtgccgagtgtggggtggccggcgaaggggagctcctcgtcgatagtgaagatccggttgacgtaggagaggccctgggcctgttgctcggccgacggctgcgacgcaaaggtcgtctcagacaggttgagctctgcgggaggaagcgggcaagggagacgatcagtcagactcgccattgaggaactctgcctgattcgagtcaccctctcggccccttcaagaacgcacgggtcgcgatcgtctggagctgacgctgggtcaggccggcatgctgctcggcccggtagaagacggcgagtgggttgccgctgtactcatcgcctgggaggcaaaacacgttgatgaggtcgtaagagagctgcgacatcggggcgtgcagggaggcaagtcgtcgttgggcgatgctagtcgttgcggaggaaaatggcttgcctgatcgagtcagagggttcgttcggctcggcactgctgcgggccggcttacgtcagccgccgcgcggtcaacttgattgtccggcccggcgttcgccgtcgcaccgttcgccgtcgctcctgtcaaccctcaaccttcgaccctccagtcctcagcctgccctgccatggaaccctcgtgtccgagccctgtctttgacgggatcgatttcacgccctgctttcgcgagcggtgcgtctgccacaccgtcctcgcgctcgagctcctcaagctgacctccctgcgacggctggccgaccgtgaccttccttccgaatccgatatgccagctacctcgccttccttctccctattatcctcaccggatcgtcgttcgccctcatcctcctcgtccgtctcgtcgagctctcttcgccggcccggcgcattgagcttccgtcggcgaggtcggcaggtccggccgttgtcggccacgtctcgcccgtcgtcctcgaggacgcggtcctccggagccaggcccgcaaggtcttcggctcggagcccgaggaggataagtcggcgctcgagcgcgttcgcgacttcggggaggtccttcttctcgccagtctgctcgctctcgaggtcgttcgcgccgttcgcgcaccggtcggcgtcacggcgccctggggcggtgtcgctctgtcggcctacctcctcgccctctcgaccctgacagcgttcgagcggatcggaactcgcctgctcggcttccacaccaacgagctcgaggctcaccggacgacactcctcatcgcctacggcctgctctcgttcatcgtccttcgctcggccgtcctcaactcggcgcccactgtactcatcgactcgctcgcggccggcctaggctccgctcttcttcttctcgatgtcctcacgccttatcgcgcggtgctcgacggctcgctcgccggccaccaggcacgcggcgccgccttccacctcgctcgtgccgcccgcaatgccgaggccggcgacagccccgacggcgcggctcgcaagcagacggtgccgggccttgaggagcctcggtcgctcttcgcccgggcgaccttcacctacatgaacccgctcatcttccggcacttcagccggcccatcaccgagagtgaggtgcccgacctccgcgaggacgacaggacagccgtcgttgtcgccggctggcgtacctaccgcgagtcgaccctcggcgacgaggagcgcgcaaagccctacgccaggggctcgctcagctggcagctcctctgctacttcaagggctacttcgcgcttcaggctgtgcgtctccatctccccgactctccctgagctcctccctcctgacgtgccgcctctcgtctatcttcagatctggtcggccttcttcgtactctgctccttcatcgccccttggacgctcaagatgattctcgagttcatcaagcgcaggaagctgtcgctcgctgagcccgacgtctatccgccgcagccgatgcacctcgcggtcggctacatcgttgcagcctttgtcggccaggtgcgtcctgctcttgcagcgactgtgtgcaacgaccctcttcgagcatggactgaccgacgctccctgaaccttgttcgattcaggtcctcgcatcagtctcgcacggctacgcgctctggctcggccggcgcatttgcatccggcttcgcagcatcatcgttctcgaggtctttgccaaggccctccgtcggaccgactcggccaaggtcgcaaaggccttcgacaacgcagccaagaaggtcgctgacgacccgctgactgccgccgcgactgagaacgacaaggaggtcgagttcgagcccgtcgaggccagcgaaggcaagatcgccaacctgatcagcgtcgacgccttctcgatcagcgagatcgcagcctaccttctctacatcttccccgaatgccctctctcgatcggtctcgccgtcatctttctctaccgcgtgagtcctcccaccgtttgccactggagactcgaggctgacgcgccctgctctgcagctgctcggtgcctctgctgctgtcggcatcgccactttgctcgcgatcctaccgcttcagacctggctcgctgcgtggtttgtaaagatccaggaccgggtgcgtcgtcccgctcgaccgctcctgcacttgaggacgaacgactgaccttgaaacctcgccctgcagctgctcgtagcgactgacgcgcgcatgaatctcgtcaacgaggttcttgccgccatcaggctcatcaaattcaactcatgggagtcgaagtttgaagagcggatgcgtgcgacgcgtgcggtcgaactcagccttctccggactcgtttcctcgcttggacgttgcagggcatcgcgacgagctttgcccctgctgccgtcacctgcgtcaccttcggtgcgtagctttgcgcgagctcagattcaggtagccggcgattgctgaccgccgctgctcttcctctgcgcagcctttcacaccaaaatttttggcaagccgctcgagacggagacggccttcaccgcactcgcgctctttaacatgctccggtgggttcctctcgaagttgatggtctgctgcactcgctgactcgcttttgcctctctctttgaccctgcaggtcgccactcgaggccttgacagacatgagcgcccatgttctgtcggcgcacgtcagcaccaagcgtgtccagaccttcctcgcccaagacgagaccgacaagtacaagaacctgacgccgtcggaagacatcggcttccgcaatgcgacctgcacgcactcgtcgaccgacccaaccgctgccgcgaatggattcgcccttcgcgaccttgactttactttccctaggggtcagctgtcgctcgtcaccggacctgttggcagcggcaaggtgcgaggcaacgagcggccttctctcgttgcaagtgctgaccaagatgctgtcttctactcgcgcagactactctgttgctgtcgctgttgggcgagactgtctgtcctgtttcgctgatgtagcggctttaccgtgtgccatcgacgccatactgaccctctgctccggctggctcttttccagtcgctcgtcaagggccagatcctcatgcacaagcatttctcgcgagagacggctaagctcgatgagcgcggtctttctcagacggtcgcttactgctcgcagcagccctggctggtcggcgcgtcggtcaaggagaacatcgtcttcggctcaccctggtttgtccttgcctctttcatcgctctttgccccgtgctatcggctgactcgccgttcgtagggacgaggcgcgctacctcgcgaccatcagggcctgccagctcgagcgcgacctcgagatctttgagcttggcgatgagactgaggtcggcgagaagggcacggcctgctccggcggacagaaggctcgcatctcgctcgcccgggctctttattcgcggagcgcaactctcatcttggacgacatcctgtcggcagtcgacgcccatactgcagccttcctcttccatcacgtcctcaagggtcccctaatggggggccgaaccgtcattctcgtgactcatgccgtcgggctgtgcctgcccggcgcttcgtttgcggtacgttctgcaatcttttctccagcacgcgcctaagctaccctgctgacaacgccgtcccttgcaggtggtgctcgacaacggttccgttaaggccgccggtcgtccgtccgacctgcgcaatcagaacgtctttgccgaggacgagcttgccgacaacgccgaggacaacgctcaccatgcaactggatccaggaagcctgacgccgatggccgcgtcgaggtctcggtcgagcagcagatctctgacgacccggccgcagacgaagccaagaagctgtcagacgctgccaagcgcgagtcgaaacgtctcgtcaaggaggagacgtccgcctcgtcagtcgccccagtctgactggtgcgagcagcttttttcccgcgtcgctgacctctgctggttttctttcttcttctagtggcggcgtttcgcgcgcggtctacgcgctctacatctcggccatgggcagcgtcttcttctggctcggactctgcgcagtcttcctcggctcgcagggcttgcagatcgagatcaacctctggatccgcaagtgggccgccaactacgatccgcgcgtcgagtcggtcaccgtcctgtcgatagtcctcgctccggtcgcccagactctgctcgccctcggcccagctcctcttgccgatgacaacttcgccttccaagcctcagcggcttcaggccgggccgactccacgaccttctacctgtcgtggtacgtcatcctctcggtaatctacctcgtctcgattgccctccggatgggctggttgttttacgggtcgcttcgagcgtcggcctccctgtacgacgacctgcttcgtcgagtgctcggcgcacgcgtccgcttcttcgacagcacgccgaccggccgcgtgctcaaccgcttcagcaaggcaagttctcccgcatgctgtcagctgcgacctttgctgacgtttccaaccggctttggccttcaggacatcgccaacgtcgaccaggaagcggcgccagtcttcatgtacctcctgacgagcgtcctctcgtgcatcgtgcgtccaactctttccctctgctccgagcctaactctgctgacaaacccgcggctgctcctcaggctgtcgtcgtcgtcattgctaccgccacaccgctcttcgtgatcggcgccgcgctcatcgtctgcctctactggctcatcggcgcggcctacctcgccctctcgcgcgagctcaagcgtatcgagagcgtcagccgcagcccgatctttatcgcctttggcgaagcgctcaccggcatggtctcgattcggtcctacggcgagaatgctcgcttcaccgaccaggccgtccgcgtcgtcgacaacaacaacaagtccttcgctttgctctggcagagcaaccgctggctgtcggtctgctgtgattgctctggatcgctcgtcgcgctctttgccagcgtctttgtcctgctcaactcttccctcgacgctggcactgccgctgtttcactgtcttgtgcgtggcagcctacctctgctgatccctctgaaagatgctgatttggccttctggctcttccggcagacgcgattgctttcaacgactacgtcctttgggtcagtctctggtcgaccacctcatgggacgacactgtgcgctgctgacagcctgtttcttcttcgtcaaaaggtcgtacgcctctactcggcgatggagatcaggtgcgtctgaccgcctgttgaagctcttgtgccgcgctgacagatctgctctctctttgcgctcaaacagcatgaatagcgtcgagcgcatcaaagagtaccttcagcttgaggccgaggaggagactacggccaagggcgtcgaacctcctgcagcctggccgtcgaacgaaggcaagatcgaggtccggaacctggtcgccacttatgctgccgaggtgcgttcggattgcaagctcttgctgctcacagactcagctgctgaccgtcctctcgcccgcgcaatagcttgacccggtcctcaaggacgtctcgttcactgtcctgcctcacgaacgcgtcgggtgcgccatccagcctgacgcccgtgttcacgatcagcgacgctgacattccaagcgccactttcagggtctgcggccggaccggtagcggcaagagttggtcggcttcgcttatgacgatctgtcccgaacgcagcctgacatcttctcctgcttctctccctcctccctcccccccccctaactccaggtacactcgccctgacgttcttccgcttcctcgaggcctcgtccggccaaatcagtatcgacgggctcaacatcgccaagctctcgctcgccacccttcgctcccgcctaaccatcattccgcaggaggcgatactcttctcgggctcagtgcgggacaatcttgatccttttggtctggccgccaacgactttgaactttgggaggccttggtcaacggtgcgtcgcgttctgctgtacctgcctgcgacgaacgcctttgaccgaacgctgaccgccggctgcttgcctctctgcagtgcgcatggcccactggtcgacgccttcggctgctgcgagccgtggaaacagccgggcaggctctacgaccgaccttgttcagcttggccgcgatggcgctgccgagggcgatgacgccgaggaggacggcgacaagctcagccaggtgacgagccttgaccaggtcgtcgctgccggaggtgcgtccgcttcttcgatcgtcgcctgcttcgtcaaccgactcgaccctctgctctccgctctcaggtaagaacttctcgtcgggcgagcgacagctcctggcgctggcgcgcggcctgctcaagctcaagcaggggagcaacatcctcctgctcgacgagagcacggccaacctcgacggcgcgtctgacgcggcgatccaaaaaaccatggccgagcaactcaaagggacgacgatgctcatcatcgcgcaccggctccgaaccatcatcgacgccgacaaggttctgctgctcgacgccggccgcgtgctggagtttgactcgccgttcgcgctgctccagatcgagggcagtgccttccgcgagctatgcgagcggagtggagaggtaagccaccacatacttcgccgggccttccaattgcagactgctgactccttcctctcctgcgccgcccgtcttgcagtactcgaccctcctccagctcgccgagcgggcgcacgaggcgcgccagaagcagggcaacgttcttcccggctacgctgcttgatctggtctcgccttgccactagatgtcatgcctgtcggatgccgatgtgttttgccttgcgctcttcactgctctgagcaagtggaggtgcaggactcatccagcgacgaaagtgcacctgcgagtcgtttgtggcccgtccccgtgtttgacaccagcgggccggcgggctgagactgccctctccgaacctcgacctcgactccccgcgtcgtcccttctcgtgctcggagccgctcctgccgctggccaggcccgccagacgacccgagaccccctcactgacctgtctcgactcggcccagccagcggtccagctttgcggcgcggcggccccttttgaatacggcggcgggaggccaggagctccccgcccgagccgctcgctcccttctccctcctcccgccactcccctcgtcgtcttccgggcaagccgctcccaagacgctgccggccttcctcgctcgtccgctagccttggagcgttcgctttcgtcgcccggtcgcctcgtccaccttcctctcctccaacactcaagtcgctctctctcgcatccgtcgacctcgtctcctcgcacagcaagcatctcgttcgtcctcccagtgcggcagcaatctcaaaccgccggtccggtctctctcatcctttgctttccaacccacgcacctcccccctgcccgcgatgctcctccgtcttctgcctcttccgacgcccgaggcgccgacgccgccgactgtgctcttcacgctgcctgcgccggtctcgctcccgtcgagcagcccggccgacccgtacgcgctgcaccggcttcccgccccgccgagcctcatcggccacgcccaggcgtgcatcgccaacgacctgccgtgcccgacgctcctgacgggcgagtcgtcctcgtggatcaatacggtcgtcaaggaggtcaccttcctgccccagaccggcgagatccaggtcctcctcgtcgacggtagcggtgtcgtcatgccgctcaccgaggaaggcgctggtcagctccttcacaaggtccgcgaccacgtcgtcgcgagtggccgagttgcgcccaacgccgtcgtcgagaagcgctttgagccgctgcccctcatgcggcgcgacagcacgtcgatgctcaagagcttcttgggcaccctgattggcggcaaggcaccagaatctgctcctcggtcctttgtcgccggccgggagctgtcggctcgccagcaccggcgtctggcacgggcgacgctcgtcgactgctaccgccgctacgtcctcaccggcctgaaggagctgtgagttcggcatgcgccgtctcacgctggctcatcagacgatgtgctgactagttgtttttcttcagcctgcctccgacctacctgctcttctcgagccactcgatcctcaaccttgaatccaagaggctaaccgcggtcgaggccgaaatccgcgtcctcgtgtcgatcgccggcctgagctcgccgccatcgtcgccaaggttgtcgatggagcacgacttctcgaacaacagcgctccccgctcgccctgccgatcgtcgagccgccagcccgcctcgcccgacccctcagcggctgactttccgccgctctcggccgtgccgttccacatccggccgacgtactcgaagcacatggcggacttcatcgacgcccaggcccggattgctgagctcgagcggctcatccgacggcaggagcgcgaggagcgccgcgttcgctacgagctcgacggcggcgaggggctccggccgtcggctctgaccctgcgggccggccgggtgattgccagccgaaagatcgtcggcaagtcgggctcttcggtgctcgtcggccccctgcagccgtcgcctctcggctggggttggactgccgaggacattgaggccgaggacaacgttgcgatgggcctcgtcgccccgccgctttcgccgtccgattcgatctggtcgacctcggacgagtcttcctcctcttcgtccgcttcgtcctccgagcacggggacgacgacgtcgccattacctcgccctcggactcggagcgcgatcttgacgagcttctcggcgcatacgcctactcggttgtcgacggatcctcgacgaaggcctcgcagggcaacccggtcggccagacgcccctctttggcctcggtatcgactttgccatcggtcaggccttgtgaagcgcactctcatctactctactctagtctctcttgctttcgtccgctcgcaccctacctaaaagccgcctctcttctgctactctatctcgctccgcacgctttgtaactgtttcgtcctgcccttttcaactcgctctgcttccctatatggctcctcgcactcatcgcacgctgctctcttggcgcttcttcctcttgctattttccggctcgttcgcagtctatcgcatgtgatgttcgactcgagacagggcagagcgagagggaaaaggcggaagggaatccgttggagatggaaaggaggagagcgacgggcacgttgaaacggtcttgtacaggggaaacgcagacagaaaaattggcggagttcaaatgcgccctccctcgtcgtcgtccatcgtgcggttgttgcgtccgccagcgccccacgggttcgccgtaccggaggtgaagtgggcggtcgggccgctccggcgggcctcctcccaagcctcgtcctcttcgtcattgccgccgtagcgctgcggcgcccgaccggcgttgcgctcgttctcgttgtgctgatcgagctcgcgccgctcagactctgagagggcctggttccaagcagcgtcctcgtgcgagtgggccgaaaagtgcttcgtgtcctcgacgagtcctccggcaggcgggccggctaacatagcaaacggagcgtcagccaggggactgggtcagtgagcgggagctgtaagattgactgacggtaagctgggacgtaatcgggcacgtgcgactcgtaggtcgcgagcggcacgccctgcgacgggttcatctgaagcccgccgctgctgtactcgttgctggccgccgtctggcgcgagtaagcgacggcaaagagcgcagcaagagagctacacgcagggaggtggcgagacgtcagccgagctcggtatcgggaagactaggatgagcggaggactgacgcaaggaagatgatggcggcgacgaggatgaggtcgccccacatgccgcgcgtccacttgtcgcggcagaagacggccgcctgaccggccgtcagcttcgactcgggcgccgagtcccaccaccagcccgtgcggagggtaacgcccgtcgtcgtggcgtcccgctcgcagcgtgacttgaggtcgtttttgaagatctggggggcagtagccaggaggtggatcagcagctgttcgtcgggaggtgcgaccgaagcaactgcggagcgcacgaagtcaaacgcaaaggccaagacgccgccgccagtggcgagcgcggcagccgcgatggacgcgaagctgaacatgcggatcatgcggtgcgtagcctgtaagaaaacgcgagcagaggcatagaccaggtcaggcgtcggcgggggggctgagacgaaagcgagcgcggctgtgcgcaccttccagcaggcgaagacgccaaaggcctcgaggacggcgacgacggtgaagatgatggcgatgatcaggtcgatgatcttcatctttgagactggaggagaagaagaagaagtcaggttcggccgaggtgcgcctggcaagggtcagcgatgcgtacgattgtctgggcaggtgcggcaggggcggggtatcggaaggtcagcttggcgcgctcagtcgaacgagtcttgcttccacacgacgaacctcgcatcgagtacttgaactgatagccggcccagacagcggaccagatcattcctaaagcagatgatgctcgtcagccagagaacacagctaggcgagttcaggcgggacgcaccggcgatgctgaatgccatgacgcttccgcgcagaggccggctgttcattcgcgagatccgtgtgaccgggcggaacgagtaggccggcggcggcgcggcattgttggctgcgaaaggcgacgccagaaggtcagctcctgaaggacgggcgccgagtggggagatgctcggaggggcggctgccgggtggtggtggccccttcctgctggaccttcaagcggaagagggtcgcagggtgcgagcgatggccgtgagcgacaagaggactgacggttgtccattctgagtttctggctgtcctcccgcctcgaagaatgtgggtaggtacgggttcgtggacgattcggtgctagaggtcgacaggacgaaggtgacggcgggggtggcggcgcctcgaccgcacggccgccgaagccgagaaggtctctctgagtcgcctgtcgacgacgagcctcgaacccctttccaagccaacagccggccagacagaccagccggttcgccctgtcactcgttcaaagccagaatcacgacgggccagcgaacacgcgattctccttcggtgtccgggcgtgaactgctcgaccgcacgagagatggaccagccgctccggatcgtcctcacgcttttgctcttcccggtcggcatctacctctttctcttcccaccgcgcatagcgacggccctctggcgggcactcttccacacgcccattaagctcgacaatgttcagcgggccttcaagaagcgcatgcttcgaccagatccttttggcgacgtggcacttgaagcctggtggccgacgccggccgagcagcttatgacacgaacggtgctccctttttctgcaacgctgacactcaacaggacgctgctgacagcccttgtcgctttcattcacagctcctgctgcgagcgcttccgcccgagctcgtcctcaacatcctgcagctggcagagtaccacacgccagtcaacgtcgtcagcgacgctcgcaagtcggtcgccaacggcagcctccgctacctttcctcgcaaccactgccccacacaggccgcctcgaggaggtcagaatcgcgctgagcggccgagaccaaggatggtcgagcttccccgagctgcacggtcggtcttccctttcctggcctgctgcgcgcgacctttcctcgcgcacaactgacgactgtcccttctcgtcatcagggacgtacgaaggctcgtcgagctactacgagctgtaccttttgcgccagatacaggcgacgccggccaatgctggcgactcgccccgcggacgaacgacgcgcagcaacccgtggacgtactcggcgtcgagcgcgatggacgacggcccggcagagggcgatcgtgttgaggttgaagtgtcgggctcacggcgcacgctgcagtacaacgttcatgcgtgagtacgagtagccccaccgccctcttacgctgccgcgactgacggcaagtctgatcttcgcacgcccgcagcggccagtaccacaagattcacctccaccggctcggtcgcgacgatccgatcctacgttttgctcagccgggcgacattctggcgatcgacatcgtcgctcgctaccagggctgggtcaacgcagtcaagtgcgtccgcatgtcgtcgttgcgcgctgcagaagccctgacccagcttctattcgttctctcgccaccagtggagcgcgcatcacatttgccttcagctactaccaggggccaaggcatgagctcgacaacgaggatactgctgagaggatgcacgacggaaggccgccctaaggttgcgatggatgacacgctgtcgttcgctcgccctaggtctgcgtctctgccgcgatctctcggcaccgtcctattgttcgtatactgtgttatcttagtagtacagcattgcacgaggtagtgaaagggaggatcagaagcactcctgattgcgagtcgaagcacgctccttcgccggcgggcgcgttgcaactgtccgcccgaccgcccgaccacgacgtacattcctcgaccagctcggctgacccgcagagcaccggacaaggaggcaaccaaggcgatcgtcatacgtagctgtaagcctgtcagcaatcagggcttggccggatcctttcagcatactgacttgaattgattcggtcgaccagctcccaagtcgcctcaccaccgctcttggctcgctcgacctggctcactgccaaggtacccaaccgtcgcaaccagaagcttggcgatccggcagcccgccatagcagcaagcatgtcaaatccgcctcagcaaactccgcttgtcagccagcagcagcagcagcagttgcggatgatgcagcagcgagtcgtgcgtccagcagctcgcgttccgagctcgcccgcttgaccagccggcgcctcgatttgacctcctctctcgccttctcagaacacggcctcccctctgccgaacggcggcctgcctggccagcagcagcaggcgcccttcaatctcaacatgcctaccggagtcgccaaccaaggcccgtccgactcggcgcagggagcgcctgcccgcccgccggccaatgcgccgccgttgacaccggctcagctcaaccagatgatcgagctggcaaagtcgggtcagctgccaaagaaccagatcgagcaggtccgtttagccggtggtctgcagtctgcggtcggatgaggtggattagcgactgacatcccctgcctgtgccatgcttctccctcccgcagctccaaaagctcatgctgtcgtacaatccgaacgcagcagcgcggccgccggcaccggctccccagcagcagcagccctcgcaggcgcctcagcagcagcagcagcagcacgccatgccttcgcaagcgaccggctcgccgatgcagcgccctccgttgccggcagctgcgcagagcagcaaccagaagatgatcgccgctctgcagggcctagcagccatgtcggacgtccagagagcccagcagattgcgactgtacgtttttatcctgtccatgttagccggctgcgcagggctgacggcccgtgtgcaacgatgtgcatccgtcatccagaatccgcagctcggcgtcttgtacgagcggtggcaggctcagcggagagtcgcggtcgcccagcaggcccagcaggctcaggcccagcaggcagcagcgaacggcggtgtcgcgccgaactcgtcgaacgccaacgccgtcggccagcagggcaacgtccgaccgcagggcaactttacgcccaacccggcgatccccaacctccagctgccgccaaaccgggtgcgaaacccgaacgcggccaacatgccggcgccgacgggcaacatgcaggctcggcccaacatgccgatgcaggctcgaccgccgcagatccaggctcagcagcaattccagaaccagaaccaggctggccgggtgggcaatcctgccgtcggcgctcagaacggccagaatggtgccgcatcagccgagggagccggcggacccaatcagatgcggccggccggcgcctcggccccgatcaataggtccaactctcccctgacggtgcctgcctcgcaggtcgggccctcgcctcatcccaaccaggccggctcacggccgacgctcagcactggtctaccggccggctcgatgctgggcacaccgagtcttctgcagcggtccggacaaggctgggacgaggcgagccgggcgggcgtccaggccaaaagcgacctcggcacgattgagggccggaagcgcaagatccgcgaggtgcttgaggaggtcgagaagggcgagaagcttgaggatggcgttgaggatgtgagtttagggtcatcacgtcgttgatctcgccatgctgaccccgtttcgtccgccttctcaaatagctcctgctcgaggtcatcgacgagctgatagactcgtcgacgcagtttgcagcccggctcgccaagcaccgtgggagcaacacgctcgaggtccgcgaccttcagctgcactttggttcgtcccatctgtctttattggtggctcgcgagagccgtggctgacgcatctcttgccgctctcagagcgccagcacaacgttcgcatccccggcatgggctcggacgagatcaaccagatccaatcacagtcgacccggcgccacccggctttgagccagcacgctcagcggctgcaggccgtcaatgcagcgcgggcggcgcaccaggcgagcgtcgcaggagcgacggccacctcgacgggcaactagccagatctctgcgcctcctcctcctttgcctgcaacccttctccaacttcgtgacgcccttccatctaatgacccccattctctaacaagcaacaaatagcgagttgcgaaccgagacatgccagagcagagcccgtgcccccctttacgccttcttcttgttgcggccagtcgctgcgtgctcggaccgggtccggctcttcttggccttgaggtcggtcttgcccttggcgttcttgccgccaaacgagccgagcttgacgctctcgcgcttgttagccggcccgccctgcttgtccatcgtcacgcgggccttctttttggccatccggcgcgcgagtcggtcggcgtcggtcgcctttgcgaccttgcgttcgtccttcgacaggtccttgatctgctcgcccagcagcgggttgcccttgggcagcggcagcggcttggacgtgttgtgagggtgcgtcttgcgcgggtcctggtacttgagcgcggcggcggcggcggcgtccttggctgacgtgtcacctggcgtcagtttgggcttgccgggaagcgtcttgcagcgctgcacacggagcttgcgcttgttgtacttgagcttctcctcgggcagcgcgagaacctcgtcaacacagtcgcggtcctgggttgagcggagcaaggtcagccgacggcagcgagaagagtcgaggccagggatgcaagacgcacccgggtggcaacgtaagcgaaacccttgccgagaccagtacccttgtcgcggatgatgcggacattgacgacccagcgatcaccggcggcagccgcagcctcatcgcccttggccgcaggaggcacctcgccccgctcggtctgaagaagcgtctcaaagaaggcgcgaacgccctcctccttctcctcgagcccgaggttgccgacaaagatcgactttttgggatcggtgccggccatccagagctgcgacttggcccgcgccgtctcggccgtcgacgcgctcgcccgaacgaggtcgacccggatcgtccggccgttaaagacggtgccattgacacgggcagcggcgagcttggccgcctcgtacgggtccatcagcggcgcgacgttggccgcccggtccgggtgggcgtgcgcaaagacgacgtaggcgttggtgaagtcggccgtcgcgtgaaagtccttcttgatgaacgcgacccgcttcttctcctcgggcgtcataaacgacttgcgagcgtcgagcgtggcctcgccgtcgacgtccttgatgccctccttctcctgctcctcacgccacgcctttgcccgctcgcgctggcggttggccgtccgctgggcctccttctcttcatcctcagctggcagctcctcggtcgggttggcaaaagcagccgaccggaagcgcgtcgactcgattttagcaagtcccggaagcgacgtcaggatgtgcgcgtggagctggtggaggagtttctgaggaaggaagagaggcgcacgtaaggagcgctcaatgtgtcagccacttgcgacctcttaaatgttctccgagcaggaagcgaaccttgtccttggcgagctcagcgctcaggttgccgacgaagagagtccggctgtcgcgctgctcctgcgtctcgccctcgggcacccagaccggcagcttgccggccttcttggcctgcgtcttggacagcttgccggaggccgcagccctgccgtccttggcaactgactcgtggacgagcagtccagcgtcggccgcaccctcatccgcctcgccgtcgacgttcatgaggttctccagatcgagcgtcggccgcagcacgaccggcgccttggccgcctcggcgtcatcctcgtcgtccgatccgagcgcggcaagcttgcgctcataagcctcctcgaggtcctcgtccgcgtccgagtcgtcgtcctcgagctccgagagctcctcgtcgttggcgaccgcctttgccttcttggctgcggcggcaggcgcagcggccaccttctgttcctcgcgcttccgcttcgcgagctttgacgtcgactcctgcgcccgaggggcctggcgaggctgccgtggctgttccgacgggaggaaggtcttgggcacacgaatcgccacgggcgccggctctggcttcggaagagcgaaggtcgcctgcaggaagaaggggggcggcggcgtcagagcagctcgacgcgggcggcgacgttggaagaacccccgaacgcacggcagtcttgaagaggctgtcaagctcctggtcctcgacgacggcggcctcaggctcctgggcggcggccggcgccttgcccttcttgcccttgccggccgccttcttggccttcttgctggcggacggcccgtcctcagcggcggcggcggcagaggccgaggtggatgcctcagcctgctgctgctcctgcgctgctggctcggcagcagccatcttcttcgacttcttcttggtagcgtccttggccatcgttcgaggtgtgagtctggtaggcggtgtaagggttgccagtactgtgcagtggtcggcccaagccacaccgctcgcacatttcgggctcgacggaaatgctgccgacttcgcgctgcgcttcgcttcggtcctccctccgaccctcttgcttggcctcctcaaccccccgtctcgagctctttcttctctactggctagcagaatgaatcacggcgatcactcgatgccgtcgcacgacatgcctcccatgtcgcaatgttcggtcagtggccgcccaagcgagcgcaattccgagctcggccgaggctgacctcgtcaagcacccttcccatcacgctgggcagatgaacatgctctggaattggcagatcgagggtgcggcctgtcctcgatcgagatccgaggcattatctgcatgctgacggctgactcgtcttcaggcacttgcgtcgtctttgagtcatggcgtgtcagcggccggctctccatgctcgtctcctggtgcgcctggatccgacgcctcgctctacttccttggctccgttgacaacaacaacttcttcactcgcgacctacagcatcgcgatcgtcgccatcgcctttgcgttcgaggcgctccgcttccggattgccgcgtacgagcgacaggtcgccgcccagctcctccagcaggcgcggcggccggatggaccgggcagcagctcaggccggagcagtcctgcggtcgatgccttccctcttggcggagtgtaagtcctgaaagcgtctctctcgaactttactggcgtccgtgtctaagctgacccgtcggatcgtctcctttgcagcatcggccttccgcagtcggttcggataatccgtgcggcgtcgtacgcgctcaccgtctttgtctcgttctggctcatgctcgtcttcatgacctacaacgtacgtgctctcgtcatttgactcaaagctggagctgactcgtcgcgcgcacttcagggctacctcatggctgcgaccgtctttggcgccggcctcggccactacgtctacaatgaggacatggaccccctgtgcgtcacactctccgtcttctgtgaaagagactctgatctgactgatttggtgaatcctcagcgctaccctcggtggttcgggcaggggcgtcgcttgccactgatggccaggcgtgcctcgaccaaagtttgcccgttcctttccggctctccttcgcgcgcctctgcctcttttatgaccctcgtgctcaacggaaagggccgcctgcgatctctcgtcccgtcatgagatctgttgctgctgggcgatgaccgatcgactcgcgttcgctgcgcgcctcgccagcaagaagcagcagcgcgtcgaccctccttgtcgcccctcttctgccatctcctccgaccacctcatgtcgtcgcccgccgctctcgacgccctcgagcagcggctccggccactcgagtatctcctcggccggccttcagctgctgggccagaggctgcgctcttaggaggaacgtcggtccgcgcgcgtctcgttgagctcaagcttgcgctcgacgacgcgacccgggggagtagcccgctcgaacgctttgtcgccgactgtcagtgccgctttgatcttgcgaccgacgccctggagctggtcgtccggagccgtccgtcagcccaaggcattgcataggacgcgtgctgacttgcgacctcgtccccgccactcctgcgcctacgcctcccgctgcccctctcatcccatggtcggaacgctacagacgatgccaacgctgccttgctcgctccggcccattccatctccccaagcgggctggccgcttccaattcttcggccgacagcctggcattgggctcaaagctcgcccttctcctggcgcttgggcccgagcttcgccaggcggccaacgagctcgaccagatgacagcgctcgtcgaccagcgcaaggtgctcgaccggccgctcccgacttccagcaccggcggtgggggctcagacgcgctcgaggcgctcgcagccgctgcgacgacggccagtagccaggccgaggcaggaagcaggcgtctcgccggccttgtcgagcggtacgacggcctcgtcgccgacgtcagccggacgttcctcgccttccacgaagagctccagacctgcgaggctcgcctcggtgcgctcgagcgagccaagtctagtgcacaggcgtccacctgaggagcgactgagggccatcccagccagcttcgcacgtcgctggttccacaccaacgccgcctgctccccgcgtaccagccgtcgcgatcgccctgtgcgggcccatccctacggcttaatccccgagggcggccgtcgtcgggacgtcgatttcacactcgcgtcctgctcaggcgagagcaaaagctgtgccgctcctgccctctgggctgtccgcggcctgtcacgctgccgctcgaacccaagcctgcaacagctcgtggccgctgctcaagacgccacatcgagcgcgatatacaagtattgatcacaggaagaaaagggtggagggtctcggtacgacagcactcagtcgtcagagaagtcccctgcgtgtcggaggtcgcgagggagagagctggtcagcacacgctatggttgacgagttaagggggcgttcgtacattggtagcagtcgacgcagtcatcctcgggctcgggctttggcaccgaccggcctttgccctttcccttgccgatctgccgactcgtcgcccgaggcggaggcgcgatccagcgtgcggccgtcggaccagtcagcgatcggttgcgacctggctcggtcgtcggcggagggtcgcccttctctgggccgtcgccgtcgtcccagtcctcggccaagatgcggttgatgacctgcacaatcctgcagaggtcgagagcgccgcggttgtcagctcttctcctactggcagatgaggcaggaggccgagatacttacgagtgggtccggatgtcgaccgaccagccgagcttgttgaccgtgtcgtagagaatcgtctggccgaggtggcacttggattccatagcgaagccagcggcgtagcacgacgagagtttgccagtgcagacaccattagggatcggatctgaaaggggagcggctttgaggttaagatgaagcaggcgccaacaacaagggcgtggacgcaccagctgtgtgatagacgtgcgtgacagtctcgccgcccatcgctggcggcagaggcaggtgcagccgccgggcggccatcacgtcgccagggctttcgaaggccacagccgggacgccaaaggtgatgccgagcagagaagcgagagcgccgccgagcgaatggcccgtcagccagatctgggcgtgcgggtacatcaccgtcagattattgtagaggtgcgttctaagaatgttggagggttcaggaaatcagccgcaccgaaccgacggaggttgtagacggagatgaggtcacggacgcgatcgggtaatagaccgactcctcgatcaaggccttctcaacacacgtctgaccgcagcggttcgcgcccgagtagcagtcgcaaacggtgtaccacgagaagtcgacgcgcgcacagcagcaactggggatggaagcaagctgcagtcagtcatcggccggcccagtcatcgcatttcgcggcgtatatccaaggacgcacgagctgacgagcgcacaaaaggggtatcagtcaagtttttcgcatacagaggacatcgagggggtgggcttacaagagcaggttgtcctgaatacggtcctgtaaaagcgaagccaaggtcagccctcgcccactactgcggtcgttgagggacctcgcttgcgagcgactgcgcgcactcggcactgacattcttcgccgtcggcccgccgctgccgaggagacctgcactcgtccccttgagagcgaggatgacggtcgatttgtcgtcgttggcaaagatgtggcctcggaggcggtcggcgtcgggctcccagccgacagggatcgactgggagggcgcagtcggaggccaggcaagcgaggtgtcagcttcgagctcaagtcgcatcagccgcgacagaagagctcacgttgttgtagcccttgatcgggtaccagcccgtctcatctggcaggatgtagctgtgagcagagaggggagacagacgagtcagtcggcggccacagaccggtgggatgggaacgctgccagcacgcacgcgtcagaggtcatcttggctaggctgagcagcgtctcgcgatcgccgacatctgaggcaaccgtcagggtcagcttgaagcgtcggcgggaagctagcagagaagctctcccagagctcacctggaccctggaccgtgtcgtcctcccagtctatcgacggcgtgaagccgagggtgctcgcccggccggcgagtcgagcagcctcgaacgcatgcctcgaccgcggcttctggaccgcgacaggccgtgtctgcagctcgaggcgattgagctctccaagtgctgtcgaaaccacccgatcgctgaacaggagcgcctggtcatcggcgggatggtgggtaaagtgtcgctggaggtggaatgagcgggcgcccgagcgggatgacgcaggcaccgcggtcgcttcgggcgaggcgaacggaagcggcacctggagaatctgaagtacggtccggaggatctcgggaaggagaatcatgcgcgatctagtggctgggtgttgcagtaaagtaggaatgggcgtcgggtggtatcggtcggtgtggtggtcggaggcagcgtggcggccgggtccaagacgcctgctggtcgatacctgcgcaagacgctctctgctttacaggcatgttctcaggtcgacaacagagcatgagtctcaagagccatgtgaagaagatgccgggcatgcggccgccatcatcagacccccttgcttcgacatctcagccctcgctgcccttgcccttgccgctgagcgtgttgcctccgccgccgcccgagaactttgcccacggatcctccggctttgccgcgtctgcgactgacgctgatcgggtcgggtggtcgactgggaccggcgtgggcacgccagccgagcgcgatggggcgggcgatgcacgggccggcgttccggcagaggtcatcgggtcctcagggacgaacgcacggggtgcgcgacctgagagcgtagcgccgctgctgaggccagagaatggggcgggctggcaaaaggcagatgacaggtacgtgtcagggagcgaaaaagacggcaagtgggggcgggtgacccgaacgaactggaggtgcggctgtcgcagtcgaagacgaagcctcgggcgcgtcgggctcgtacggcttatgggtccaaccaaagaatagcttgccggctgggagattcagcgccgcaggcaccttgtcggtcgagccggatgcaagatcggcgagggggataaagcgcgctttgctgcgaaacacaaggacgcacgggtcgacagtcagcccgaggagcgacatgatgcggcgaacaggtggggcacacactcggtccggaagatcttgctctccttctcaacctcctcaatctgccgctgcagacccttgcctttggttcgccggccgttgagcgtccgcccaccgccgacgaaagcctcgaacgccgcctcgccatcgtccgcgcccgaggccgaggccgaccgggtcgatggcgcggtcgagttgacgtcaatcttgagcttggacgccatcgtcgcgaccggcttgggttccggcgccttgggctcgacgtagccttttgggacggcaaagtcaacctgcgagcgtccggcgcagcgcgcactggccgtcagcagccaaacctgcagcggcgcatacagcagaggcgaagacgcacctcgaggtccgtgtcctgacacgagatgccgcgccggtcgcctgggtggacctccatgacgagaaactcaaaggagatcatgttgtacgagactgaaaagatgtcgccctgggtcaggcaagagaagttgcgcaggcacgactcgaggctggatagagcgagacgacagacgtcagtcagagggcttgaaaagacgggtcaacgggcccacgcacacggcctttgggtcgctgacttcaaggaactcgaggttctgcgcctggatcttgacccgcttgcccttcggcagctttgcgccggtgacgcggagcgggtcgccctcgcgcagcctagggatgagaagagcacagacggtcgtcagccagcaattactttggccacagctgactgaagcgaggaggcgcactcgagcgtcttcatcatctgcgagggcggtcgacaggcgtgggctagcggttagcgctccggatctgctagagcaaactggcccgccggctcgacgtacccatggcggcaagtatacgacgccctcctcggcaataaactcgagcacgccggcgtgcgtctcgagcgcggccgacttgggattgcgcagctggaacgtccatggcgattcgagctccatgttggctgcggttcggacgagaacagaggtcagctagagcgtgattggtcacagcttgtcaagtgggtctgactgagtctggccagcgcagagggtggcatgatgactgttcgatcggagagagacaaaggaagcagaagggggtcagctccagcgtctgtcgctgctcgctctcctctcgcgcaggtggggcgcactctttccgccgtggatgaggttggcccgctccgatcgcgaggccatcatcgccgtcgagtaggccttgaagtagtcatcatagtcacgcctgcctcgtgcaacaggtgggaagagggatcgagagcagagcaagcgtcagcgtcgggggcatcatatcttgctcccttgctcccctcgatgtgctcagggggggacgaacggttcgggcgggccacgctgcatacctgcaagctggtcaaagaaaccgcctgggttgcctgggaggagagcggatcaggccgacgatgttgtcagcccaagcttgagctgagtcggaggggcaagccaggctagggagggggtcgagcagctggcagcatcatcgagctcgtcgtcctccctccgccgcacctgggcagaagacgcaccaaagccgccggcgttgccgccaaagttggggtggtacatccttgcaatgcgctggaaaagtcaggtaggatgaaagctcgagattggcaggaaggatggcagaggaggaggtcgtggtcagaggggttcgtgcgggaagtccgcgcgctggccgccatcatcgacctcaggcggtggtcggcgcagcagtcgccctctcatgcgtaggccgtctcgactctcctcctctctgaccaggcaataggcgaggttgagtgtacaagaacaacatgcgcatctaggcggacggtcgcctcccgaccattgcagaaaaccgctcctctcgtaggcggcgcgccagctggcctcaggcgtcgacctcgtcgatctcgtacgtctcgtcgccgccctgctccatgtcggcgtcccagtcgccgtacaccgcctccccttcgtcctcatcatcctcgtcaccctccatcgtgccaaagccgttagcggcgacgcgcggcttgggcgcgtgaacgacgggcagggcggcgagcgaggttcggacgagcgagaggacggtcgagacctcgtcctccgtcaggcggtcaaacagctcctcaacaatctggcagaaggagatgcaggaagtagatcagcctcagccaacgacggagtggactgaagtcgaccgaggtcgcccggtggcggcgcaccgtgtacagctcgaccggcgtccgcgggctgaggtcgatgatctggaggatttcgatctttgtaaacttgtcgagctgctgcaggtcacgcgagagctgctggttgccgtcggtcgactggcgcgacgtcgtgagctcggcctcgccaaaatgagcaatgcccttgcgcggcagcaatcgagccgagagatgtcaggcggcggcgctctcgctcaagcaacgaaaccaaggaagacgcaccgtgtcgacgacggccttgagcccaaacagctgctcgcggtcaatgaacctcttctcgtgctcgctctcggcgagcgtcccgcggagggtcgggtcctccttcatcttacgcatgcgctcaaacttgagctggtgggccttctcaacgtcatcgagctctggcttgagcgttctcaggtggagaaggacctcgtgcgacgacacaaaggccgctcgggggttgaggatctgggagagggcagaggaagagcgcgaaggtcagcctgcgcggtcggccggcgagcggaggggtcggcaaggcgaaacgaacgtccatctcgcggcgacggcggcagcgacggccggctcgtccagagtcggcaggcgaatcagaccactagcgggcttgcgacagtaaggatcgaggcgaagcggtctcctgtttcgctcgagtgccgggtcgacgtgacggtcttgggtcggacgctctccaagcggttttcgacgcgcccgcgagcgcgcgcccggaggaggagcagcagcagtatggccgcttcgaccctgacccccttcaccgacctctctctctctcccccctttccctcacaccccacccttctcccgccgccgtctgcacaaacatgtcgggtatcggagtgtccaatgtcggcaacacgcagttcaatgacaaggtccgtcgctcctgaccctcgcccttgacgagcgcggcgcgcgatctctgcgcggccgacctcccggagctgacctcgccctcgccctctgctcgcagggcaagcccatggaggtccgcctctcgaacatgaacgcggccaaggccgtcagtgacgctgtccggacctcgcttggccccaagggcatggacaagatggtgcgtgtgaacggttctgcaagctcgtgagctcctcgcctcttgggttctttgctgaccggctcgtcggcccttctcgcctgctcgtggctcggtttccagatccaaacggcccagggcgaggtcgtcatcacgaacgacggcgcgacgatcttgaagcacatggccgtccttcacccggcggctcgcatggtcagtgccgaaacccgcttttcggggttggcttcggccggtcgagctcgagtactgacacgccagcgctgctctcctttccccgcagctggtcgagctgtcggctgcgcaggacatcgaagccggtgacggaacgacgtcggtcgtcgtccttgccggaagtctgctgggagctgccgagaagatgctgggcaagggtgcgcctcctcccctccgtcgcgagcgccctttgatgtcgactcgcagccgaaaccgatgctgatcttgacttggcctgccctaggtatccacccaacgctgattgccgagtcgttccagcgagcggcgacgaaggcggtcgagatcctgaccgagatgtcgacgccggtcgacctgaacgaccgcgagacgctcctgcgcgccgcgtcgacaagtctcaactcgaaggtccgtgcgggttgtctcttgtggcctgaggaaactcgcagacagctgacgccgggcctgcccgacctgcccatcagatcgtctcgcagtactcgtccgtcctcgcgccgatcgccgtctcttcggtcctgcggcttgtgacgccgacgtcgaccaatgtcgacctgcgcgacatccggctcgtcaagaaggttggcggcacgatcgacgacaccgagatggtcgagggactcgcgctccaccagacggccatcacctcggccggcggcccgacccggatggagaaggccaagattgcgctcgtccagttccagctgtcttcgcccaagcccgacatggacaaccagattgtcgtcaacgactaccggcagatggacaaaatcctcaaggaggagcgcgcctaccttctcaacatgtgcaagaagatcaagaagacgggctgcaacgtcctcctcatccaaaagtcgatcctccgcgacgccgtcaacgagctctcgctccacttcctcgccaagctcaagattctcgtcgtcaaggacattgagcgcgacgagatcgagtttatcgccaagtcgaccggctgcaagccgattgccgacatcgacgcctttaccgaggacaagctcggctacgccgagctcgtcgacgaggaggagaaggccggcgcccgtgtcgtcaaagtgacgggcgtcaagaacccgggccggaccgtctcagtcgtctgcactggcgccaactcactcgttctcgaggagagcgagcgctcgctccacgacgccctctgcgtcgtccgctgcctcgtcaagaagcggtccgtccgcatcctctcccgcctcagggtcccttcggttgctgatcccttcacttgaaaccatttgcagggcgctgatcgtcggtggtggtgcgcccgaaatccacatctcgcgcctgctgacgcagcacggccagacgctcaagggcatggagtcgtactgcttccaggcctacgctgaggcgctcgaggtcatcccgacaacgctcgccgagaacgccggcctcaacccgatcgcgatcgtcaccgagctgcgcaaccggcatgccaagggcgaggcaacggccggcatcaacgtccgcaaggtgggcccgatgttccaagtgtctgccccgaaatgtacgagacgctgactgctcgaaacctttctcttcagggcacgatctccaacatcctcgaggagaacgtcctgcagccgctgctcgtatcgacgtcggcgctcgagctcgcgaccgagaccgtctgcctgctgctccgcatcgacgacttccagttcacgcggtgagctcgaagcccgaacgaaaaggaaacaactgcgcttaacgagaatggggcggggggagggacgtgctccgatctagacgggacggcgcgccagccctctgacttccgtgtacgatgtcaatcttcaaagcgcgcggcatgaggtatcagagaacagcgagacgagaggcaagtgaaaaggactacaacgaggttttgcttgagctaaagatcgcaacaggcgggaagaagggagagcgatgcaaggcaagaggaacccaaggaaggaaaggaaaggggtacaacggggggcaggggaaggctacaggactaggagggttggctgcaggcgaagcggcgggaggaggagccagcgagggggggcaatcaacttgtccgggagcttcagtccttgtggcgcgagacgacctcaacgccagcgcagacggcagttttcctaggcaagaaacgttcgtccgtcagtcaaaaatatgagcgagcaaggtcgccattaccagactcaccgagcctcgtccatcgccgcccggtcgtcgtcgtcctcgcccgagctgctctcatcatcgtcgtcgtcgttgcgccgctcgtcgtcgtcatcgtccgaatcagacaggtcgaggtcgtcttcgtcgtcgctgctgtcgatgacgacacctcggcttgcacccgcgccagagctgatgctcatagggttgacagtcgagtgcgtcccggccgtcggcgtccgcaagccgtcgtcgtcaggcgtccggctgtggccgtggtggtgatgcgagtgcatgtggcccggcagagtgaacgcctggacgtcgtgcgagagggcccggctcttgcgctcggccgcgagctcctgctggcgggccatctcgccatcgaggtccgactcggagacggcgaccgagtcgtacgagctcgggagttcagacgacggcgtcttgggcgtcagcggcgacgactgccggccgtcagacgagacggacggtgctgccagcgagctgcctgagtcgctcggcggcgagagaaggagtgctgggtcgtctgctgcggccgctgcttcggcggcagcgcgctcagccgccgccttctcccgagcctcgcgccgcttcttgacccagctgatgcctgagggagacagcgcagacgtcagctcgttcattcccggcatgaccaggtgcgaagaagggccttaccggttccgtcgtcgctgtcctcgtctcccggccggctgttattgcccatcgagccgaccgaaccccactcggagaactctggtccgcggagcgcgtcctcctcagccttccggatcgcctcgacgccgcccttgacgccgtaggcccggccgttgagcatccgggcgccgacgagcgaccgacttgcaggcgagctgctgagcgccgacgagttaggtccccacgacgacgagagcgggacctccatcgagccgcccgacatgcgccgccgaccgttgatcgccatgccgatggcactgctgccagaggcggcaccgcccgcgctcgaagacgagtcgggcgagaggctggcgagcagccgggcctgcttgtcagccgcgacgtctgagccattggacgagcgcgagaccgagggcgaaagtgtccgcgtcagggtgctcagtaggtcagacgccgcgccctggccgcttgtgttggactcgatcgacgacgtccggtcgagccgcttgctcgccgaggacgacgaagatttgccgccgaacagcttcttggtgctcttggaccatgaggtgccgagcatcgacgagagccgcttctggccgccggcattctcgtcgtcggagccatcgccgttgcttccgcggccgttgccgttctcggcgtcgttgtcgtcgtcgccgacgccgtcgagcaggccgctgtcgttgctgtctcgccgacggagcgaagtgtcagccgtgctgaggccgccctgcgtctgaagctcttccgtccgctcgccgccgggaccaagcgtcgccgcgagcttgacgttgcggccggtcgagaggcttcgctggtgctgcctcgggtcgggcagcggggcaaacttgatggacgcaggccgggccttggtcactgagcgaccgcctgtgcgctcggcgggctcggcgatcttgatctgctggccagttgagacagacggtccagcctcggtcggtggcggcgcagcgaacggcggccggcccgcggcgtcggcgtcaaacgagcggcgcgggaggttgatcgacttgttggctggcgaggtcggtggcgaggtcgagtcgtccgggagctgcttgagctgtaggcgagaaagaaagaagcggacagtcgagaagcgttagcatgtgtggccgggagaagatggccggcgggctcagccggtggcacacccgcgtcagagcgagcgagaaggagagggggccgcacaaggatgcctcccttgcgcggcgagctcggcggctgctgctggttccagatggggcccgtcggcggcgaggagacgacggtcgacatgcggcgagaggtcggacggctcggtggaagggagagatggctcgagagggcgggctgtgggcgagcgaggttcggtggagggtctagcggccggagggtgcgggaggctgcagccgcaaggaggttgccgacgacggcgagcctgtgagcagtgttcgagagaaagtgccggcttgtcctgtttgcgctctgctgtgagagtgctggtaatgctagctgaaggttgaggaggcgtcgttcggagggagcgagcagagggcgctgtcagctgctgccgtcgtcgagagacgccggccatcgcgggcccttcgtcggtacccgagagtgcgcagcgcagaggaaggcgagctaagggacgacgacgtacgaggggtcggcaagggccgtctgtcgaaaggtttgtaagaggcgagctggcgaccgtagcaaagggagacgacaagcgatggggctgggaggagcgcgaacctgctggccaggctggagggcttgcttgcttgccagctgctcggtcgctgccctcacatgccgccggcgaggcccggaccctttttaggcttggcagcgagacgcatttacggcgggcccggaggccgatcgccaaaagagaagagaatcacatgtttgatttcaggctgaaccagacgacgacattgtaaagggggacgcttaacgaggcagtcagacctcgggcggctcctcactgagcggcgttggtggctcgagcacgggcccgccgtttgcggcggcatcgtcagcgttgccctggcggaggaccttgatgagcgcctggatgccctcccagccgagtctgtggccatacaggaggcaggtcagcaccagcgagagaaacatcggagcacacggaacgcacccctttggcgggtaggcgacaaagagcggctgctcgtcaacaccaaacttgtgctggagaggctcagggtcagccgggccgaacccgtttgcacgcgctcaaacgaaacaagacgcacccggaagtcaccgcgtttcgtcaggcccgtcgtcttgagcacgcgcttgtaggccttagacagccaggtgatcttccagccgttgaggttcgagacgggcacgagctcgttatcggcgctgatgccgaacgagacggagggcgcgccctcgagccggaggtcctcgagcacagtcgagatcaggtgctccgagacgcccttgggtgccgagggaaaagcgatggcgtccttgatctgccagcctgggagagcaagagaggaagagaaggtcagtcgcctctccgagaaggcgcaaccggctcggcgactcacctccgtccttgatcggcgcgagcacggcaatcgccagcggctcgctgcccttaatcgccaaccagtagcgccgccgttcggcgtcgatccacggctgaagcgcctgggcagcgagcgcgctcgacttcttgcgctcccaagcggcgaggccctgctcgaccgccgccttgagcgcgccctgcggcgggccggcgagagcgacaacctcgacgccggcgcggttcgagcgccggatattcttggcgagatccttgttgctgaggtcaatgtgctcgggccggatgaggtcctcctttgaaaggggagagagaagcggtcaatgcgctatgggccggtgaagaacgctcagcaacgaagcgcaccgaccttgacgcacgtcagcgcgctccagccgaggtcgttcgcgagccgctgctcgagctcctccgagatgcagcaatagattggcatccgttcactggcctcgaccgagcggatccatgcgacggccgtctcgagccggcggttgagcgagcggtcacggacgaccgggtcgccccaggcaaagactgcgacggaggatgggcggccgaggaagggcagcagtcagcggtaatctccggtcaggccggcagagcacgacgacggcagcggacgcaccccactcgtcccgctcgaggtagccttggacggccgggtcatcggccccggcgtgtccgggcgcctcaaagagccgatgccgggccgtctcgagccaggtcgagcttgcgctgtcgccccacttggcgagctgcgagagggtgatggtcaggagccacagctgaagcaagagggctggcgacaggaggcacgaacggcgggcgcgaggtccttccggagcgggtcgaggtcgagcgaggtggccgtgagggtcgtcgaggcgggcatggtgctgcagagagtcggcggtggtggtggtggtggatggcagacagagagagatagggagaggctcaagctccgtctcgcctctctcgtaagccggttcgagcatccgcaaggccggagagaggagagagaggagggggatgcgatggtcgacgtcatttcccgggttggcctgcccctttcttctgaaactggcacccttcgcgacaccagtactcggcctgccgttccctgccagcggccacctcgaccagcttaacctcctcgccagagcacgactcctgccgaaccatggcaacagcttcctactccacccctgtgccatccttttcagccgaaatcagtcgtccgacgctcagtcgctcgggacggagcgcctaccgcgagcgccacccaccgcccgagcccgccggcggccactcggcttggacgcgcgagccgctcgcctcgctctacatcgcctggcgcggattgacgtcgctcctactcctgccagcttgggcagcctgtgcgtgctctttcttcgctcgacgtcacctctcccattgcgagctcgctggctgacctgcggcaggagctcgatcgaccgcggaaccctgtcgcacgacggcagactacctcgtccggccccgacctcgatcctcctggtctcttagccaagctgtccaggtagcctggctccgctacgtcgccgtccttcctgagcggacgaacagggcttttgggacccggccgcccgacgcgcggccggcgaagcccgggcgcgagaccgacttcctctgggcaagctcgctgccggccgaggagcggatgggcgtcctgctcgatttggaagtcgcgttccaggatcgtgtcggcctctttgtctggccgaaaggtgttgggcattcggttttgggcgagggagatgggctcgtcggcctctggtgggggcccccttctgatccaagcgacaggaggtccagctgacaacgacgcccctctccccctcgtctcgtccgatcagctttcatggcggcgccctcgtccatggcaacgcctccgagcaggccgacatggctcgtacgttgagacgcgatcttgcacgggcctctgcccacccgccctgctctcgcttaccaagcaacacctgcttcttcaggcatccctcgacgactaatgaaggtgaatcggaactaagccttcgctctcgctgacgtcggtctgactcgcacacgttcgcttattcttgcaggaccgcgcctttgcccggatctactcggtcgagtaccgcctgattcatcataccgcctggcccggccatctgcaggacgccgcgagcgcctaccgcttccttgtctgcgagctcgccatctctccggcccggatcgtcctgatcggcgatagcgcaggcggcaacatctgcctcgggctcgcgcgatggcttcgcgacgctgcgcggccgacgcttggcccgccggcggggctgttgctcttgtcgccgtggagcgacccgtcgcgttcatttccttacgagccgagcagtcatattgctcggccgaataacgaggctgtcagtctcgacgctcgcagctccccgatattgtggttttggcgctgaccatgtagcgcctggcaggactacttgcttgacgagccggcgccgcgctcgctcctcgtctcgaccctgctcggtcaccacccgccgtcgctcgtccgctcgccctatatctcacccgcgtgctggcaactctcgggccggccgggcctcttcacaaagtgtgagcgcgctcagcattccaagaagacagatcaggcctcggctgacgctgctggctcggcgcgccagtctcccctgtcttcatccactacggcggggccgaacgacccgagcatgagatcgaggcgctgatcgacggcctcgagctcgacggcgtgccgacgacagttgtccgttcggaagacgccgtccacgacgtctgcatcctgcgcgtctgggacgagcgcgagcgcgatcgcatctgggcggcggcaggcagctggctccgagcgctgaaagaagggtcgggcaatggcggttcgtaaatggcaaagttgagcgaacggttgacaacgagcattgtttgaacaggcacgctatgacatggatctcgctcgacagactactcgccgtcgttgtcggcagcctcgccgtcgctctcgacctcctctgggagtgtgacaatctcgttgatgctgtgtgaggaagaggaggcaccgtcagcagcagcggccagcacgttagaagcgcacaggtcgcactagtggatgagcggccgggcaatcgtcgcgacgcggaggagctcatccatgaagtgcgggtggacgacatcggcgtcagagtagctacggcagccgatgaagcgaggcaagcggtcaatcagtctcgaggaaaggggctcaacgcaacaggcagacgcacgccttggtgacggcgatcgaccgcagacggagcaggtcaatgttggggtcgtccttcgagtagcccttcggcgcgaccttgagctcctgcgcaggggccgagagaagagagaaggacatcagcacctttcacataccgagcgcgccgatctacgcacgtcctgcctgccaaagacgttgcgccggcgcgagaggtcgacctccttcttggccgccggcttcggcttctcggcctcgctgtcgtcgctgctctcgcccttcttccgccgcttcttcggcggcttcttgggcgccgggggaagggcggagccctcgccaaactcggtgacgaaggctgggtgattgatgatccggcggaagcgcttcgggtgccgggcaaacgaggcccttgaggggtggagcaggcccggtcattggcaggtcagcaccagttcaaggcctattgagagatggagggcacagaccggatgttggcgagctcgtccttctgcggatcccagagtccgaaagcggcaatcgaccggttgccgggcatgatcgagaggtggtagtgcgcgaagatccccttgcgaccgctcctcgagatgctcatcgactgggagcaacaccagagcgacagctgtcagcacctcgcagacaaaagcgtcggggcggggcggcgcaccagattgcgcttgtacggcgtcttgtcggggctgaagcggacgtcgcctgctcgagagattgcgtgtcagtgacgagcggatcaagggtgaaggatgactcgcggcgtacggttgatgcctgacaagacgcatgaggacgagcggtcagcaatgcaagcggagagaggcgtgcgcgagagagacagggccaacgtacgatgctgcgcgagtcaagaggtaggggcagaggcggtcagctgtgagtcacgctgtgcaaggagagtcctaactgaccgcgacatcgttggcctggaagaggcgtccaactccggatcatcagccggtgttgcgagacacgatcgtccgggtgcgaaggaagctcaccttgacgaacggaatctcgtcgtcgacgtcaatcagccgcgggatgagcgtgtcaatgaaggcataccattccttctgggcgacccggtagacggcctcgtttcgccagaaccagtccttgtcgttgttagccggattcgcgagctgcttcataaagttgagcgtgttctggctgagccggccgggggggactgcgcgacacgtaggaacccgatcgtcagcctgccctttcatcctgcctgaccgggcagcgatactcagggaacaggagggcgagtgagactaaccgaggccagtcgtaggcgccttggcagccttgccgatgaccttgcgcccgcgttcgtcgccagagtcatcgttgtccgagtaggcgacggcctcctcgcccgcctcgtcggtgccttgggctgcctcgtcagcgtagtcggcatcggccttggtccccttcttcttggccttgcccttcggtgatggcttgcccttggctgccagcttcttgcgcttggccgacactccgttgtcgtcgtcgaggtcggacgagtcaaagtcgtctgatgacgcggcatcgtcgtcgctgctgctgctgctgccgctctcctcgaaggccgacgcctgcgagtcgtcgtcgctgccgccatcgtcgctcgcctcctcctctttcttggagacaggcttccgtgcgggcctttcagacttggccgggacgtccgacttcttgcggggcggcatggtccaaaggagacgctggcggcggctagtgatggctagaggcgactccaagagcgttcgtgcgagcccatgacggcgcagcccgacccgtcgaccttcttacctccttaccctcacacccagaagcaacacttgtacccagcatgcctgcccagaccaccatcagcccgatcgataacaagccgtgcaccgtgctcgacctgctctcggccgacgagctcgacgccgccgtcgccgcgagcgtcattgcccagaagggctggcgccggacgacgcttaaagagcggatcgacatctgccagcgctttctcgtgcgtcgtctgtctgggaatctgcggctaggaagagaggcttgacgactgaaggaatctttcgcacgaacagaccgagttcgagaagctcaaggacgagatcgtccctgagctgaccaaggagatgggccggtacgtcgtctctttcacccaggtcggagacagccgcctgctgacggccggctgtgacctctcccatttgccaggccgatccgctacactgcgagcgaggtcgggagcacgctggaccgggcgcggcacctcatctcgatcgccgaatcgtcgctcgcctcagtcccaaccgaggagaaggctggcttcaagcgctacctcaagaaggaggcgctcggcgtcgtcgccgtcgtctcgccctggaagtgagcagacttagcgcacagccctcagaggacccgagctgacatcttcgttacgctctcagctacccttacatgtgtctgatcaactctatcgtgcccggcctgctcgctggcaactcgctcctcctcaagccttcgccgcagacgccttcgccggccatccggctcgccgccgccttcgaatctgccggtctgcctaagagtgtccttcaggtcctccacctcgagagcgccgacacgctccggctcgccgctgacggccgcgtcgcgttcgttgccttcaccggctcggtcgctggcggcaagggcattgatcgtgctgcggcagagggcgacggcttcaagggcgtcggcctcgagctcggcggcaaggacccggcttacgtccggggcgacgtcgatgtcgcctgggcggctgacaacctcgtcgacggcgccatgttcaactcgggtcagaggtgtgtccccccccctccccccccccttttcctgtcgtttgagctataccgaagccgactgaccttcgcccgtcacatgcgcagctgctgcggcatcgagcgcatctacgtcgatgccttgatctacgacgagtttatcgccaagttcgctgagctcacgggcaactacgtcgtcggcgacccccgcgaggaggcgaccacgctcggccccgtcatctcggtccagtcggccaagcggatccgtgctcaggtcgccgacgccgtcaaggctggcgcccggacgcttatcgacgagtccaagtttgcggccgccaaggagggctcggcgtacgtcgcgccgcaggtgctcgtcgacgtcaaccactcgatggacatcatgagcgaggagtcgttcggccccgtcgtcggcatcatgaaggcgcgtgcgcgcaccaccgcctctgatcactgtcctcctgcagcgtgagctgacgcttcgaccgctctcgccaggtctcgtcggacgaggaggcgctcaagctcatgaatgactcgaagtatggcctgacggcctcggtctggaccgacgccaagaacccatcgtcggtcgaggcctttgagcggcttgccgatgagattgagggtgcgcaggtcgtcttgctggacgtctcttcgctgctttcgctctgctgaccggactcgatgctcgccctttgcacagccggcaccgtcttcctcaaccggtgcgacttcctcgaccctgctcttgcctggaccggcgtcaaggacagcggccgcggcgtctcgctcagctcttatggtgcgcgattccgctctgctggttctcgcgcagaacaagacggctgacggcgaacctcttccgctcccaggcttcgaccagctgacgcggctcaagagcgtccacatgaagctgtagacggtcggtgcgcgatagaaagggcactttgcgtgacgatgcgagacccgacgaggatcagggaccagttgagccattagaaagaaagtggagagataggagattgtagctttgctgtttgctcttcggggagcggctctacttggcggcagcgttcgaggccttggggataccagagtactcctcgtagccgagcgcgaggttgaggttctgcaggcactgggtcgcggcgcccttgagcaggttgtcgagcgcaccctgtgaagtggtcgcgtcgtcagcactgggatcggcaagagaaggagaggagaacgacagacgacggcgacgacacgcttgcccgagctgtggacctggaggccacccatcgtccagccgtgagttccctcgacgtcacgaacgtcgacgacaccctcagtcgggccgagcagggtgacgagctcctggccctcgtaaaacttctcgtagagcgcgcggacctcgctcgcgcgcatctcgtgcttgagcggggccgagaggaccgagatgatgccggcgtaccaggggccgacggccggcacaaaggcgagcttgaagggctcgggcgagatcgtcgacagctggtgcgaggcctcgcgctcgtggatgtggtccgtcagcgagtacggcttgattgcctgccggagcgatgccgggtcctgcgagatggggaaggcgggtcagcggtgtgaggcgcaggaagtcggcctcaaggacgaacaattttcgagacggtcgtcgggaagccgtcctgggcgggcgggccagacttggtgccggcgcctgagtagccgctcgaggcgacgaccgtcggcgggttgctcaggtcgaggtggggcaggagaggggcaattaggagctgggtcgacgtcgcgaagcagcccgggttggcgatccgcttggccgagcgcagcttctcgcgcgagtagagctctgtaaaggaaggcaagggggtaggttagttgaaccgccgagaccctgggaagcgaggacccgaggcacgcaccaggcaggccgtaggtccagccctcctcgaaacggtagtcggccccgaggtcgatgatgacgctcttgccgccctttgcgcgctcgatcgcgtcaacaaacggcttgcagacgccgttcggcagggccatcacccaggcgtcgacctcgccggcctcctccatctcggccatcttctcggccgacaggttcgagtacagcacctcggacttggtgtagccctcgagcttgcggccctcgagctggcgcgacgagacgtgcgagaggaccatgtccgggtgaccgttgatgagcgcgaccaggttctggccggtgtggcctgcagcgggggagaaaattaaccatgtacatcagcccatcttatcgcagacaatgtgcagaggccagggggaggagggcgggcaaagtggaggaacaggaacccccgaccaccacccccgacccctccttgccttcctcctgtactcgctgcgctttacctgacgaccacaccatggccgaggaagcagcctttgtcgcccaggagtttgtctcgagtgcgtccggcgggggatcagagagagacctgacctcccctgctgatcacgcgcgcgctgctcgcctgccaacccgccctccccaggcctcgacaacctaccgtccgaagtagccttcctgctgaacgagatccagcagaaggatgccgtctatcagggtgcgaccggagctctcctctcagcgtctccggtcgaccgcacgtgctaactgagtgcccttccagagctgacgacccggctctcttcccggacgtcgtcgcacctgaagcacatacggccgtcgtcggcgctcaacgcatccatctcgaacccgtcggcaccctacgtcgcgacaacgatcaatccggcgacctccaaggaggccaaccagacgctgccaaagattgcggccgagtttgaccgtttggcggccctccagcgggacaaggtcgcactcgccgagaagctcgtcggcggcgtcaacaagcatgctcggcggctcgagctcgaggtcctcggccgagtggccgagctcggcggggtcgaagtaccaaaagtcgatcgcgaggctgtcctcggtccgttcgccgacaagaagaatggcgactcgagcaataagagtgcgtcgagcgagctggccggcccgagagcgcatcgtcgcgcagcgctgacccgaccttcttgctcactcgcaacagagcgccgattgaacctgccgccggtcccaatgccggcaccgtacgtcatggcgtcaaacttcccagcctcgtcctcgtcgggcggcggccgccagacgccagcgatggccccgccgaccgttccagcccaccttcatgcccatccgcagcatggctcgcatccagcggcagcgacgccgtccggtggggctggcggcagctctggccaagcgcgggcatccccagctgccgcagcgcacccaatgtacattcccgccaactcggcctacgtctcgcagatgccgccgccactcgcgccgtcccggacgacgcacgccaaccagcacacgtccagtgcagcagcagcgaccgcagcggccgcctcgtcagcggctgccaatgccggcgggagcacgcagaaggccgccggctcggccaagaagcgcaaggcaaaggccgtcgagatcgactcggaggacgacgcttttggcgaggacgatgcgctcggcgagccggacgaggaggtcgagggcgccgaagagggcgctggcgacgacgagacgctctactgctactgcaagcagaagagctttggcgaggtcggtcgcgtgctcatggtcgacgccctcgcgacattactgacccgtgctctgccctcctgcagatggtcggctgcgacaacgacaagtgcgagatcgaatgggtgcgccgccccatcatcgctagctcctcgagcccgcctgctgacgctagatctgtccctctcctcgtcgccgccagttccacatcaagtgcgtcaacctcacgccgccgctgcccgaaacgtggttctgcccgacgtgcaccgcgcttggtgccggccgcaagcgcggcggaggacgcaagtaggagccctggctcacacgacaacgactatcatgaccctcccccttttcacgacctttcctgcgctcgctcggcgaccggagcgaagaaggaagagcagtcacatggatcgtacacgacgtcgaggtcgggcgcgccgccggtcgagggcgcagagagcgaggtgccgcgaagggcgagccgaagccaaggagcctcactgcttggcgaggccgacaatgttggcttccttgtacgcagcgggcttgccggtgttctgccgagaaggcaggcagatggacggggggtcagaacggggacgaccggcagccggaagccgagaagcggcttgcctggttgacaatgtcataccgcggctcgtcgtccgaggcctggacggtgatcgatccggccggcccggtctcggtcatgatcttgacgatctcgccaatggaagtcgacgtattggcgtcgccgccgcccttggggggagcgaggggtcaggtgtcagcgcgccacgccaggcgcagagggagacggagcgagagggcacgcacgatcggatgatactcaacgagatcgccgaccttgtactgaggtgacatgctgggtgacttgggggtgttgtgcaggtggggaggtaggtgagctggcaggcggctgggttggtggatggtggtggtggtcaggaggaggggtgcgatggctttggccggccggcccccctcttcttgtactccccgcgctcgccgtgctgacgtcgtccgtcttcgcttcgtctgacgtcagggtcgcagacgaggaggtcgtccgggcgcggcaggcagcaggcacgacgtgccggcttcggctcccggggcgcgcgcagcagcaacggccggctccgacactcctctcgcccttcctcttccgcctgctcctgcctccaggccggcagcacgatcgtggcagcagattgggcagcatagatacagtcattgtggggtggatgggatgatacattgagactccgacgctcacagctcgacgtcctcctcgtaagacagcctcgcggccgcctgcagccgggcctcgaggtcggtcggtccgctaaaattggctcggccgtcgagaagccagcaaccggcgcacatgatgaagacgatcctggaaaaagagcattgagtcagtgagagcgacagcgagcaagtgagccggcaggacaggagacgaacccgacgacgacgcagacgtagttcatactacttccggtcggatttgtcgctggtgggaatagaaaggccgccgtcgtgagcagcgcaaaggctagcgcaaatgcgttgatcgggcctgcagccaagggtaggggggagggtaagcgaagcgagcggcgagcctgtgcaagagcggccacgcacgtctaaatttgccgagcgagagcgtccttttgccgtgcgttgcgagctcgaggccgatctctccacgccagagaatgagggcaacttagaagcggtaaggctttggtcagtatcggcacggcaggggagaggacggcgtaggtcacaaaggggctgactaggtatcaagtacgacacttgcaagaagcagaccgaggctgaaagaatggcgttgagcgcgacatcggagccgaggaagacgaggccgaaaatgatgacccaggtggcggtgaaaaggaccgaccagacgggcgctttgagcttgggatggaccatgccgagcggctgcgataacttagcaaagccgcggtcgcgagcgtgagaccagaccatacggctagcagcagtgagcaagccttcagagtggacgtctcaagtcagctcgcgtgtcatcgacgaaatcgaagggatgaatcacgtgccttgcgttgcgaaggccatcgcgcaaacattgaacatggttagaccagtggcctgcgcagatgagggagagagggcgacgtcagtcgttgcgccagatcagtcagtcattgtcaagacgcacgccggcccgagacgaggtcgcctggaagtagacctcgatgaggctgccggccgaagacgagatgacctggtcgaagtccttcaagcaaaagagcaggacgacgagaaagcaccacgaggtggacgctccaatcatgacagcgccaaccatgacccgtgggccgttgatcgatggtcggaccatctcgtccgagagatggcagacggcgtcgaagcctgtcatgccaaaggtcgactgcaagaggccgatgatgaaggcccagccgtcgggccagcccgtccggttcgtaaagttgccaaaaacgaaagtggccggctggtactcgccccgggcggtagccaggacggtgatcatgacggtgacgaggccggtaagcgaccagataaaggctgtccggtcgacgtgcgggagcagtcggacgccaaagatgttgagcgcagtcgcaccgagcgtgaaggcgaggaagacaaggaagacctggtagggcttcgactcataagaggtgtcccacagcgcaatcaggctggtaatcaagacccgtagatcagcacgagttcgaccgacagggcgcagtggagtcgaacgagggcgacgcactcgacgacaaagttggcgccaagcgagcttccggtcgcgaccagcgagacccagccggcaacggccatccatctgcgggtcgaatcagagggtcaacgtcgacgcggcgaggtgactggctgcgctacgactgacccttcgaaataggtgaggcctcgtcggcagctcgcgggagcaaggatccaggtccagtcaaactggccaccagttgtgctgtaaacgtggcagagctcggccctgcaagtgcggaggtccaacgtcagcagctgcctcaggagtagcttccgacgggctgcgagtactcacagggaggctgccatgctcaaggaccctgcggcgctgacgacgaggccccagacgacagcgaccgctcctccgctcggcaagatgattcctagcctgcgagaagatggagtcaatatcaagcggagagctcgcaggcggtcggaacgtacgaagcgctcatggctgcagagggaggagcgcaactgaggacggtcagccgagctcgtccgcagccgccgtccctcaagcttgagacgcaccggtccacgagttcagcagcgcaaaggccagaccgatgcaggcaaggccagagaagtttcgttcaagctggccgtcgtgcaggccctcgagctctacccgcgggctgccgttgctggccgaggcgttgctcttgacgggctgaagccgaccggtgaacgccggctcgcccttgctcgccttggtttcaaagtcggacatggcttgaagtaggtgtgtgatgcctggccggtgtgagatggttgtcggctggctgggaacattcctccgctcgctccttctttcaaggcaaacgaaagagcgggcgaagatagagagaggtcaggaggggctgccgaacggcggccgctagggaaccgggacgacgaccgagagttggagcccgcaagcgcatcaacagatttagattcgcctgccttgccgccgccattgtcaatcaactgccaggcggagcagcaagaagtcgtgcacgagcgagcgatgccttggaacgtctgatggtactcggaaaggcctatcgggcgatttttgagcggccgagcagatgatgatgggcatgagatcgaccgtttagacatccccccccttcactccctgcatcagctctggcccttgatcaccggcctgggtcgggatagcaagagagcgtcagcgcacggagacgggaagggctgcaagggacttacccgagctcgagatcctccgccttcagcaccctgccctcgccgttgacgccctgcagcagtccagcgctggcgccgttggcactcgtcgaccgactggaggctgcaagcttgcttctgcgaccctccttcccgatgccgagcctacggaagaggtcggcgacgtcgtcgggcttgttgcggagtgccttgcctcgcacgccagcgaccttgatactgcccgtgccccggaccgagggcgagtggatcgacgacattgacggcgcgagatgcgtcgtcgacatgctcgagcgaccagctgtagagggaggagtcagcggcgtgacaatcgtcgacggaaagtctcttgcgtcatgaggagagggaatacgcactgagagcctctcgcaagtcgccgacgccgagcccttcgcgctgcttcccacctccgacgccgccggcccaggcgaatgagtgcatgctcgcaccgtcgcccgctaggctgccgtctggctttgtcgcgggcgacggttcgaccaaggacgtccgatcggcaactgctgatgagggttgcgagattgcaaatgcgcagcagcgtcagccctcaagcgcgcaatgaccaaactgtcagacgcgttgatatcgggccggacccgagcgatgggacctggcccgaataaagacgaggggacgaaccagaatcgggcgagtacggcgcgagtagccggtcctggagcgtctgctgattgagcccggtgccctcctgcagcggctgggaccccgcgagcgctaggacgcgggcgcgaacgtcaccctctgcagcaataggatggctcgacgggtagtggtcgctgagcaaccgccagacctcgtcaaagggcgagccggcgcttccaccagcgggctggacggcattgaggagaccgacgacgtcgcacacgaccatcggtccgccttgtcggacgacggcgaccagcagcgccgttgcccaagtgaggtcggccggttcgggctggaccgtgttgacgagcagcgagacgcgacgctgccgcggcgaagagtctgtcgaggtcgacggcgctgccgacggcgacggcggcgcctggagaagatcgaagaggaccgagaagatgcgcttgcagaggcggccgtcgtcgccttcgtcgcccgagggcagctcgctcgagatgtaagtcgtcaagagcgagccgtaggccgaccgaacggccgaacttgggtggctgagcagatgtgtcgactggccgacgacctcgggcgggacagtgtttcgctcgccgacagtcgtccggccgcctgactcgacgccgcccttgcccgaggctaggatgaccttggccgcgtcaagtagtgcgagtagccggtcgggcccgccggcgccgtcgagccggccgagaatctcctcgataaagtcgatgttctggtccttgtagtagaccttgccggcgagcgcgccgatcgcgccgagcacgtccggtgatgggcggcgaagaagaagcgtcaggagcgagccgagcagcgtcgagggagacaggccgatgagcgacagctgcgaggcgagcagccgtgtcagcgccgcaaggagcgttgtccgcttgacgtcggtctggtcgtcgtcgccgagagcgagaagaagctcggctagtgtcgacgggaggacgaagcggtactggacgcctccccaggcggccatcccttcgagcaagccactgacccactcgcgctgcgcccagcggtcgggcgacctgtcgagccaggcgcagaggacctcgacgacaataccaagctcggggccggttgcattctggacgagcgtccggaacgatgagatggcagcctgcgagagctctgcctgcgtcggtccaggcagaccgggcacgtgatgaaccgactgcgcgcggcgaagacggagctctggcgccgagtaggtggtgatcggatgtgacgacgagggctctttctcagacctggcggacgccgagggaatcagcagctgcacatgaggacaatttcaacggctcaaggacgcactgtagcaggagctcggcgatcgccacgtgctcgcagcagccgagcaggctaccgacgatgacctcgaccatcgcacggtactcgcgcccgccgagaacgtcgctcgtcacgctcgagctgatggccgcaagggcgagtagccgaatgcggaggatcatctcgtcgtcggccttcctgtcagagaggatggccagcgctgcgaatcggcggaggatcgagtggtagagtgaagcgagagccggcgtgtctggcggcagaagagtgtaggtcgtgaaagcgcgaaactggtcaagccagggggcagtcagcgcagagattccatcgactgcaagatggccgtttgacgcacgacggacgatgcccgggcgaggatctcgaggtcgatgccagctgagcccgagccagcgctgggagcgagcttcacgtcgagcgcgtagctgacggccttgaggaccgaataggcaaacagcgggaggtcgcgccgacactcttcgcagagcgacttcagcacctggagcgtcaccatcagactcctgaaagcgtcggaagtcgggtccgtcagtcttcgagtcgcctggagcactcggcggcgcaatctaaggccgcacgctttggaccgagcattcgagcctgccttgcgcgcatcggtctcagccttggatgcgacctcggaggcgatgtggttgagcttggacggcttgttgctcaggtggtacgtcagccggctgagctcctgcgagtttggctcgctcgcctgcagcttgctcctaaacgaccgcggcgcacgttgcagctcgtctcggtcagcaccgtccttcgccagacgcttgcgactgccggtcacctgcgacgcacttggggtagacatcacggatgagccggtcctccttctggagcctggcgatcgaggtagccggagttgacgggcgagcggaggcaggtcaaggtgcgacaggaggccagcgaagagcgcgcagggtcggggccggttgcaggagggaccggcgcgcggtagagcggacgatggccaagtcacccggtcgttcagcgagcagggtaagtcgtcgggcggcaagagacgttgcgtgagggcagaggcggggtcgaggcaagcacgaacgtcagtctcggcgtggcccgcagcgagcagacgttgtcgaggtgcctcctctcctcagcggactgccgccctcctcggcggaaaagggacgtacaggttgagcggcatcggaggaagatcggcgaaggtgccgtgcctgcgtgcgacgtcttgggtcgagtatggcagtgggagttggcggagcaggtcgactcgacgctgggctgagatggctcccgcctagcgcgttgagttcggaagctgaagcaagccgaccagccagctgcctcttcgacgttgcacggcgaccgccatagaggctcggccggcttactctctcctgggcgagcacgagctgcccgggagctgacggggtcgcgcgtctcgtactgtcagacgactggcaccttcctctggccggttgctaacccaagcgtcgtttgccgccgctcgcactcgcggcccgtacctcgttcgggctcgggcatgctcgcctgctgcttacacccctcgggacagacctcgagatgcccttgaaagaggccgccctcgtgggctgctgattctcatcctcacttgccctctcacccaaatcctctcccagcagcctctgtgagtccatttgtccgcccgagcctgcatctgctgagcctcgcgcagccgctgactctccccccgcccgacagacctgtccccccgtcatcctctgctcctcatgcgcgtctccagtttcgacatcaagaccaccgcctcgcaagctggcaaggtctacctcatcactggaggtgcgtcgctcgagctcgaagccctgcttcggggatccgatcggtctaggagggcgggacggcgcccctggagaggagggacaccgagggtggagaagggagggaggatacacgacacacgcgcccccgaggcccctctcctcagctcgcaggctgaccctctctcctctcaaaggtacatccggaatcggtgcagagagcgttgtggcccttgccaatcacccttccccgccggcccacgtctattttactggccggtccgaggctcgggccaaggaggtcattgcccggtgtccgtcgccgtcggccgtctcgttcatcaaggccgaccagtcttccctggcggccgtcaaagagtctgccacgacgttcctcgcccagtcggaccgtctggacgtcctgatgacgaatgccggcattatggacgttccctctgcggtcacgatcgacggctacgagatgcagtttggtgcgtcctgatgttggtctgcttgcgacgaggcgagcaccgctgacgctcggtttctgcacaggcactaaccacatgagccatgcgctgctcatccagctgctcctgccgacgctcgcgaagtcggccgacccccggctcgtcattctcacgagcgagctacacgacatcacagcgaagacggggctcgatctcgcgcagaccggcaaggacgccaaaggtagcccgctcggctacggcgttgccaactatgaccggtccaagtacgccaacctcgtctacggccgcgagctcgcccaccggttcccagatatcctcgtcgtcccacttcacccgggcgtagtccctactcctttgacgagcgagtcgtccttcgtcaaacgggtcgtcatgcgcatcgtccaggccctcattggcatcactttggaacagggtgcattcaactcgctctgggcttcggtcgcgcagcgcagcgacatcaagagcggcgcctactacgtgcccgtcggccaggagacgccgctcaagaattttgccgcaaaggacgccgaggccaagaaggtctatgactggaccaactcgaagctcgcacccttcgtcgcctgatccgggcgcacacttacactatacttaatcagctcgctgcctgcgattatgacgcctttttctcgtctctcgtggactgttgcgggaaggaaagcgacgtccattcgtcgacctctgggctgatcggtcttggaggaaagatagcaccgatggaggaggcaggggggaggagggatggctgtcgcgccgacgcgactgccggtcccgctcgttgtcgacagggcgcgcgcgctcccctgctccttcctgtccctcacctcgtcccttcgacccgtctcggcatgcgcgcccagctctgcgctcgaggtgcgtgaccatctgctcgtagtctgactccgactcgcaaacactgaacttcctactggcagccgtccggcggcggcaggtgctcagcttcgctcggcatgcccgccagatgtcgtttgaccaggctcaggtcgcttcttctaggccacccccccttgaagcagtggagatcaggtcgtcgcccgctccgccaccccctcttccccctccccgactagcgtcgcccgcagcctgggagcctagcgtcggtgagagcagcagcggtgtcgggtcgagctcatcaacggcctccgcgccgctgcctcctcgtccgcccgtcgtctcgtcagaacccccagcgtggaggcttgagccgtcaaacgagccagccgctccgctgtcggccgctgagcgtctggccgagctcgaggcaaggctcgccaagctccaggccgagctgttcgcgccggtcggcggatggggtcgggcgacccagctcgccgaggagaagggcctcatggtgacggcggtccaatggccggtacccgacgtcgtcatcgagcgcagaccgcggaacatggtggcgcctgttgaagggtcgaggaagtcgctgtcgcccgagccggtctcgaaaccaccggaccaagccgtcagcaaggcggctactacggtcgtcccgtcgacccgccggcttctccccgtctcaaacgtgaagccgacgatgaccgaggcggtcgcgactatcgtcactattgagcattctccacgtcgggtgagtctctacagcgtcttctgcccttggcgcagagtgagctcgatgactgaccctcgagcgcccgtcagccctcctcgtcctctccgcagcctctgcaaggtgccgtggccggctccgctgaggctgagccccaagcagccttggtctcgtctactcctgccttgcctaccaggagcgcctcgcaatgtacagcagagactgtccctgctcaaatcttggccaggacggctgtcgcgccaaaagaggcaggtccttcgactcacaccggacgctcgggttcagactcgcagagtcttgccaagcggaagagctcgcgctcaggtcacaagcgtcaggcgacggccctgccgaaggaggaccacgaccgaaatactagcagtctcaaggaaagccgcacggtttcgtcccggacagcgacggttccacctctcaagacgagcgcccctctctctcagcggcggcagccggatatccagctcaagaacccgcccgggactaccgccaccaagctgccactgcctccgtcgactgcgtcgtctccggtcatctcgagcgtcgctcggccggattcgcgcgctgcggatgtgtacgacgccaaaaagccgatctcttcgtctgacaccgtcggacccaagctcgtcccgctcgcgacgacatccctcctctcggatttgcccagccctccaaagctccctctgcgcaaagaaaagcctgccgtcttagcggcgccggtaaccgttgcccctccagtcggcgtccgctggcgcaacccaactagatcggctcgcgagaaccccctgcccagcgaggctggggacaccgtgataaaccgcctcgtccagtcgtcccctggctacaagcttctcactcttccggcgccagcggctcgcagagtagaaacagcgcccacggtgccgcctgcagtgtcgcctgcggtgtcgcccgtactcatctcgaaccgaggcaccactctgtcgacatcctcaatgacggcacgcatcaagcgggacaagcaagggagtcttctgcacccccagcaaccagagaagcccgttgcccagcttcctaccgccccttcgaacaagctcgggctcaaaaaggacttgcggccgcagccggcaagcgacaccgctctgcccacacctccgtccctggcaaagtccgcgtccgcggcccccggcgtcgctccggccggccgcaacgtcaagcagtctgccctcacgcgagctgcgcgatcgtcggcggcgtctgccgccgtcaccgagtcgaccgacaaagccgttgtcacgattgctctcgtggccgaccctcaaacgccccttctttcacctcgcaaaaacattgcgtttgagcccacggttccgagcgccaacaagttgttcgccaccgagctcattccgccacctcactacgtccgcggtgacagggctgcgtcagccacgcgcaagtctttcgagacgacggcgtgccgcccgacggcagacacgaggtcctccaagttcgaactgtccgagtccgcgactgtcgatcgtgcaagaacgtctgacaaggccgcgagcaggaacgcgatgtcgagaatcaggcctggtcggaccgcatctggcctcgcatccggcgccaagatgccagcggcccctccagtcaaactgccccggtcctcggctcggtcgacgctgaatcctccgccgaccacgtcgcctgcgggctggcgtctcgaagccgcagacaaaggccctatgcctcttcacgtcgagccgcaggtaccggtctcgccgtccaggtctgttgttgccgccttttcggccagcctcagctttgcatcgtccatcccggccatccctgtgccgagtgtggatacggcgtggaagctgtcggctgctcggcctctcgccgcggatctgcccaagcctcccatcgtgcctcaagatccggagaaggtggcgtcggcagccccgcccagggctccgactcacgtcgccatctcgctcgagactctagcagacgcacctcccccgggcttgggcatcatgctcgagccgctgcagggcgcgatcctatacctagggaaacgcttacactgtacgtcaaacccgcgctgctggcgtgattctcaccgcacaattttctctctgacgcctttgtctcccctgtcagtgacgggcccttcggcgccgagctttgacatcagccctctcatgctcgctctcggcgacaggcgctttgtcgacgcgacgtctgccgaaggtcgggcatctcattcagtctggcccttccttgccaagcccgactgacatctttctctctcgcccgaccgtagatcgcgtcgcagtcgtcaagggtatcacggcggtagctccctacacgaccggtaacttgcttgcgaagcgaattgaggtcagaagggtcaagacactgctcgaagggcttgtcgctcgcctgcaaccaccgtccgagcggtgccgtctggccagacggccgacatcaagacccaaatcaagctcgatcgagcgcatcggaaccgactcttcttcggtcacgcgcgccgtggtcgccacgccctctccggccgagcgcaccgtctcgatgcggcggcagcaagtttgggctgcgagcgacgattcttctcctggcccgacctccgacgacgctctccttgcctaccccgccatgccagcttttccagccgcctcagactacgtccctgtcacccagtcggcagcagcaggtcctgctcgaactccggtaaacggcggcggcagcggtctcgcctcctatctcgagacgtcggctcatcgccccagcctgcgggaggtctcttttaaagccaggtcctcgatgagccccagtaaaaaccttcggtggtctgtgctttgatacggcggcttacctgcccatctacgatgcctgccttgctttgtgcctgcgagcagaccaccgccgtctccagtgccgtcttcagccttgccaggttttaaagaccccgaggcggccagcgccgaagctctccgcgcgagacctccttgccagcccctcctcctcccatctctccatcacctcttccagaaggaccccctccgtcagctcgcaagtgagtcctggctatgagtgccctggctctcatttccctcgtcgacccgcggctgccgtgggaggagccgatcgttgcgcacccgcacgcaccggccagctcgttgcatcgatctcgccctgccttgagctggcccgagaggtcctgacctcattcgtgatatccatgcgaccgaccgagcatggaaggtggcttgcacattgtgggctgaccagcctgtgccgtctggctttgcagctctcgaccgcagcatcgcgctctcgcccgcccagcatgtcgcccatcccatggtcgacgattcacccgcacaacgagctcagcttcgcaactcacccgtccaggtgcggatcacgtccgtctgtgctagaaactagtcgctaatgaactttggctctttctcctcagacgttcgaccgtctacgggacgaagggcatggtcgcctcgagtcagccgctggcgactcaggccgggctcgagatcctcaaccttggcggcaatgccgccgatgctgcagtcgcgacggcggccgccctcaatgtgacggagccttcgtgcacgggcattggcggcgacgtcttttgtctctactttgactccaagagcaaggaggtcaaggcggtcaacggcagcggccgcagcccagccaagctcacgatggagcactgccgcaagcagggcatcaacggtcgttcgatcccgctgacgggtgagtggaggcctgtcacaggtcttgcgaccctcgtggcctgacgaccttgactgtggacggcagatctcaactcggtcaccgtgccgggcgcggcctcgggctggtgcacgacggttgagcagtttggctccgggaagctaacgatggcgcaaattcttgccccgtgcgtccctttgtggattctgaagactgtcataaactattctgacgctgctcctgcttctaccagatccatccggatggcagaggagggcgtacccgtctcggagctgcactcgcacggcgtacgtccgcggcctcatcgcgcgagctccacctgttgcggctgacgcaacctcctggtccatccatgttgccagtggcagcggtcagagaacctcatcaagaacgcctcgccctcagcagacgcgatgctgctcaacggccgcgcgccaaagcaaggagagatcatgcgcttccctgaccttgcgaagacgttccgagcgctcgtcgacgagggccgcaagggcttctacgagggccgcgtcgcagaagctatcgtagagcttatccgggtgcgtctaagatcagcctttaaggttgcgggcgcggctgatgcagggcctctgcttcttttcagagcaagggcggcgtgatggagctcgaggacctcaagacgcacgatgcccaggttgttacgccaatcagctacacctacaaggcttctgaggaagacgagggtgtcaccgtctgggagtgcccgtgcgtacgatcgagcgccgcgatccacaagctaatactgaccgcgtctctctctaatcgccggccggcccgccaggcccaatggccaaggcctgacggcgctcctcggactcggcctgctcgagtcgatggaggaaaagggtctcctcggcaaggatgggctcgctggcctcgagcacaattcggttgagtacctgcacaccttgatcgaggcgctgcggctttcgttcgccgacacgcggtcagtcgtgctacccaacgaactcaccagcaagctctgcgctgacgcgactgagttcacatcgacagctactacgtgacggacccagacgtcgtgcatgtcccggtcaaggagttgctcagccgatcgtatcttaactcgcgtgtcgaaggcttctcgctcgacaaggcagacgaccaggttaagcacggcttccccgtccagagcagcgataccgtctacttcacgacggccgacgccgacggaaacgcctgctcgttcatcgcgagcaattacgctggctttggcacgggcgcgatccccgcgggctgcggcttcaccctccagaaccgaggctcgggcttcacgcttgaggaaggccacccgaacgagctcaagggtggcaagaggccctaccacacaatcattccttgcatggcgacccgcggcaaggagctcttcctctcgtacggcgtcatgggtggttgtgcgtcctcccgcccgacgaaacgtcccaagcaactctctcgctgacctgtttctcgttgcattcggcagtcatgcagccccaaggccacgtaagctacctttggctactcaccctcgtcaagatactgacactgaatgcgcttcgcgcgtctcgcctctttgtaggtccaggtcctgctgaaccttttgcgcggcatggacccccaacaggctctcgacgcccctcgtttctgcatttcggtcggtcgtctgcgcctttcgcttcgtagtcgtccgacagctgatagttacctttccaggccggcctgcccgacgccgaggtcaagacgacgcactctgccggcgacatcaactcggaggtgaggccgagggcatcgccccgcgctgcccagagtactgcctgacccttcattcgcttgcttgtaggtctacatcgaagaaggcatcccgtcctcgactatcgaggctctacgcgcgctcggccacgacgcccggcctgctttcggctttgcccgctcgacgctcggccgggggcaggtcattcagcagacgatcgatgcgacgtcgggccgacgtgtctgggcagcaggcagcgacctgcgaggcgacggcaacgctgccgctcagatctgaaaggccatcgctcgcagggcaagattgtatcacattccgttgtatgcagaaaagggacgtcggggctgctactgctactgaagacaagtcgccctagaggatctgatgcactggctcgacagagccgcctgtcaggcgcggcgagccgccattacccttccgggctcgagctcctgacgcagctctgtcgtcatacgcactttccagacggaggatcgccttttgacagtgactttctgatagcaagatgattcctgatcgcccttgggacggtggccgggcggaagagacttgcctagtcaatgacagtcgtccgggggtcctttccgagcgtcgctcggtggttgaccgcgccgccagagacactgtcaaaaagagcagaggcggtcagccaacagacttactgggcatgcagccgacagcaaagggaccgacctggacagcgcgtgcccatagaaggttgacgcccgggcgagcattgtctgctcgagaacgccgaggacgtcggtaaagacgagcggccaggcgtccatctcgcgccggtcctttgcggtcaaaaggtcctgaatcatgacggctccgtgttccttgtagtactcgatgaatgtagcgttgcgctcgtccgtcgcgaggtagaacctgccgggcaggcggaaagagagggtggtcagtagcagaacactgagcgagatagcaagggagaggcacgcacggatcgtccttcttgggcgggtcgcgggcgagatactcgggtgcagccgtcgcctcgggtacgacgtacttctgaacgtagccagaggtatggatctcgacgagcgtcctgtcaggtcggttgagcccagagggagggtcagcgagcgtgcgaggggtggcttcagggggcgctgagcaggacgcactgccgtgccgtctccatccacttgacgatgcggtggaagtgctcgtgcgggtcggcgttcatgacccagccgtgcttgacaaagtcgccgcggcgcatgtgggccgaccgccatgtccggccgtcgacgcgttcgcgcatgcgctcgtcaagccgctcggccatctcgccgagcagcgtcggcggcagaatgtcgtacaggacaagacgcgcaaagcgctgcgatgcagccggtgtcgtgaagcggagcgttcccggcttgcgccagtagtgcgtctcaccctcgagcagcaggacctggacgatgtgaaagggtcagcttgacgcggaaggacctagggcggtacgagtacgagtctcacctcgctgctgatcgagttgtagtcgtcatgccagcccttcatgtcctcgacaagtgacacctgcttgatgggctcggtgaccgttcggacgtactccatgccgtgcctttcgacgagggaagcgcacgcattagctcaaccggtcgtcaagcaaacacaggtctgccggaaaagaagagacgcacgagccctgccaggtgtgcaagatgtaagcgccggcggcgttgagcttcttttcgaggtcctcgtccgactcttggccgtcccagacggcgcctcggacgtcatcccactcggccaccgtcttgccctcgagcaccttgcggaccgccttggcgtacgggtcgagcgccttctcctcctccgataggagtcgcgcaccggcaggcatccggtcgacccgcgagaggtcggtatcatagtcgcggttcgggatgacgtgcaggacggcgccagtcgtgtggtagccgttgcgctgccactggccgcgaatgtcctctaccgaggccgggatgtcgtgaaggagcaggtaatcggcgaccgtcatgatcggccgagaccgccggatgtgggggatgttgagcatgagctgcatcgatggcgagtggtgcgagagagggtcagcgcgcgcaacgaaagaaccacccgcgcgtaggagctagctgacctcggtcgggatgagccacgcccactgcttctcctcgggcaggtcgtcccactcgtgactctgcatggcctgcccccggttgacctgtgttgcgaaggctgaggaggggcagatgcttcagattagcccggctcgctgctgagctggctttcgagctgtatcggacgcaccggcgcaggtgtccttatcaaactcgcaagcgcgagcgatgacgtgggtagggacgacgagagttcggtcgagcatctcggcgtgaagtagcgacgcctggcgaaggggacgatcaggtcagcttactgctgcgcagccaccgggtgacagcaggttgttcgaggtagtcggcaggcctgaaggctgctacggacctcgatgatgtagcgaatgttgttccagccaagccagctacgggacgaagagtagcagagggtcagcgtattaaaacggacgaagggggccaagccagacgcatggcaaggagctcgggctcacagtggataatcgcggacgtagtagcccttcgtcttggccaccatctcatggagtgcctccttgcgcgtcttgccagcgcggatctcagcctcgaggctgaaggcgcgggtcccgtcgtcggcaggcccgctctcgacggcatgagtgcttccgtgcgcgggctgaccgccgccgccgctcacccggccttcgtcctgccagagctgctcacacttggccttgtcgaccgcgtacgagctcttgctaccgccgctgccacctccgccgccgatgtgcgagaaccagccgtcgtcgtcgtcgccagcagcgttccagtcggtgccagtcgacggcttgcccgaccacgacgagctgacggccgatgtcacccgggccgggtgcgaggggaagatggtcacgtagaccgagaggacgacgacaagcgagacgaacgatgtcaagagtggccgccgcttgagaaaaagctggagccgcttggccttggatggcgagtgatgcgacgagcctccgccggcggatggcggcgggaggagggcgtagtcggcaggcatcgcgcggaggcggaaacgggggagagcgcgggccggccgcgaaggtgctgccaacgagggctggtcgtctgaactgagagccgagcgagttcacgaacggccaagggactgtgcgtatgaggggtcgtgatcgagtgagagctaaggagaagatagggaaagagggcgaggcgggctgaaggagaggcaggcatcctagcgactgggcgggccgactgtctgtctggacccgtttcggcgccacgcgagcgagcgccctgccggccgagcttcttgcaacaccctgattccagaccctcccttacacgagccgaaaccgcctttccgcgagtagagtatgtaaggcgatgcgatccagtgtgaggggacgtctttttgagcggcgacaaatacaacccagcggagtggcaggcgagcggcgcaacagataagtggggaggaagaagaaagggacgacaacgagctgacgggcaggcagaagcgggagggaggagagagagagagagagtggaggctaccagtcggtcgccttcttatcgacctcacggccggcgacgggcgggacgacgttcttctggccgacggtcacgtagccgagtccatcgagccagggccaggtcgtcgagcgcgaggcctcgaacgaagcaatggcgtcggccttctggagcgtgagcccgatgtcgtcgaggccgttgatgaggcagtggcggcggaaggggtcgacgtcgaacgcaatcgtctcgccgttcggccggcggacgaccgactcttcaagattgacctcgagctccgcgccggtcgcggcgtcgtcaaagagcgtctggcagtcggcctcggggaggataatgacgagcatgccgttcttgaagcagttattgaagaaaatgtcgccggccgaaggcgcaatgatgcaacggacgccaaagtcgttgagcgcccagggcgcgtgctcgcgcgacgagccgcagccaaagttggcgccggtcgagacgataatcttggactggcggaagggctcctgattgaggacgaagtcggggttctcgacgccctcgctgacgtagcgccggccccagaagagggccgagccgaggccggtccgcttgagcgtcttgaggaactgcttcgggatgagcatgtcggtgtcgacgttggggatcgagatgggcgcggcgatgcccttcaggatggtaaacttgggcatgccggtcggcgcgacgggcgtcgcggggacgtcggcaatcgcagtcgcctcctcggcggcagcgtccgaaagcgggggagcagcggcgccggcagccttgggcggcgcggtcgggacgtcggtcaggtagtcgagcgagtgggtgatcttgacgttctcggaccggggcgaggtccggccggtgatcgtccggacgtcggtaaagacgccattcatggcggcggcggcgaccatcgccggcgacataaggtgggtccgaccgccggcgccctggcggccctcaaagttgcggttcgacgtcgacgcgcaccgctcctggggcttgagctggtccgggttcatgccgaggcacattgagcagccggcctcgcgccagtcccagcctgcagccttgaagacgacgtcgagaccctcagcctcggcctgctccttgatgaggcccgagcccgggacgaccatcgcatagaccgtctcgggcaccttggaaccggccgggagcgagaggatgacggacgcggccgagcggaggtcctcgatgcgcgagttagtgcacgagccgaggaaggctttatcgatcgggaccgtgttgatcgggacattgggctcgaggcccatgtactcgagcgcgcgctccatgccggccttcttgatcgggtcggcgaccttggccggatcaggcacattgccgttgatctggatgacgtcctcgggcgacgtgccccacgtcagggtcgggatgatgtcttcggccttgatgtcaacgttgatgtcgtacttggcgccgtcgtcggcgtgcagcgtcttccagtaggcctcggccgtcgcccactcctcgcccgccttgggcgcgagcggccggccgcgaaggtagtcgagcgtgatctggtcgggcgcgatcatgccggcccgcgcgccggcctcgatcgacatgttgcagatcgacatgcgggcctccatcgagagggtccgaatggccgagccgcagaactccatgacggtgccggtaccgccggcggtgccgacgatgccaatgatgtggaggatgatgtccttggacgtgacgccaggggcgagcgtgccctcgacggcgatccgcatgttcttcgacttgcgctgggggagtgtctgcgtcgcgaggacgtgctcgacctcggacgtgccgatgccgaaggcgagcgcgccgaaagcgccgtgcgtcgacgtgtgcgagtctgagcagggcgaggacgtcagacgtcagcgggctgttggtcgaggtcgatagaaggcgcaggtcaggcggcttgacgcacctccgcaaacgacggtcgtgccgggtagggtgaagccctgctcagggccgataacgtgaacaattcctgatgatggtacggagaggcgggatcagtaaacagctggcgaaagagctgctacgcaggcaggaaagaaggcgcaccctgccgccggtcgccaaagccaaagtaggtaaggccaaactccttgacgttgtcctcgagcgcctcaatctgtgcgcgcgagtcggcctggaagatctgggacgacatcgacttcttcgggtcccggatcgaggtcctgatgaagggcggcaggcggttgtagatttcggctcgtcagctattggtcacagcggcccgcgcggggcgggcaatgacgatgggctgcaggcaaagaagcctaaggacggacgggatgttgtggtcaaccgtgacgagcgtgcagtccgggcgacggaccggacgcgaggcgttcctcctgcagagcagaagagagcaaggagtaaggtcagtgtccggcgaagctcccgtgactgcaggccggaggagagcgaaatggcgctagctcccggatcgggccactgtcgccgaacgtgagagggatgagacgtacaggccctcgaaggcttgtggcgaggtgacctcgtgcacgagatgacgctgtagacaagcaagagcaagaggaagtcagcgacggagagacatagcaggtggcgacggcttgccgccgctagcccacacgaccggagaccaatttcggcgcacgcacgtcaatgtagagcagggtctcgccgttggcctcggtgacaatgtggtcgtcccagacctaaacgggggcacgccgttgtcagcgaaggctgctgcgaggaccgtcggccgctgcagccgacctggacagcgggaagggacgaggagcgcgcaccttgtcgtagagcgtccgcggggcagtggaagggatcggcatggctaggggaagtggttggacgagatgcaagcctgtcagcttcacgagagctgctgctacggacttggggcagggccagccggctacgtacaaggcaaagaagtgggggaagaggctcgaagatggatgtcggaggagaggagctgccttcagccggcctgccactggacgcctcgtctcgcgctcacggagccttcggccgacgagccggcgggcgaaaagtcggcgccgcagagctagacgacggccgcgactcgaccggggtgcagccggcttccagcagggacagcagagctgacagcagataaaggcaagaggcatgtgagagcacgggaagaggttgggttgccggtgcggggggatcgcgtcgcagggcacgaccggaagcggtcacttggactacgagatgccaacaggagacggtaggcagggctgatgccgtcaactccgactggagtccttctgacatctgttgcgtcggggcatggcccttcgtcgcagtcgtcgcaacggcgggcgaggcgggcaaggcaacaggcgtcccgcagattgcatcgacggccgtttcgcacaccgtctggacgatgggagccgctccgtttccgaacgtgagcgaggtgtcggagtcggcctttgcgacctggtcctggcgggggcccttcctgctggtcggccgtcgcgcacccgctcgtcatcggccagtcccgagcggcagcgcgcaggtctgactcgcgactccagagcgctctcgcgccactcgagctcgtcctcccgccggctgagtgaggcctcccggtgcgcccggcatgccggtcttggagttgatcttgatgttcgaggcgtgagatgacgtcagtcaggataactgttgcgcggtgatgagtgtcgcgcgcgaccgacgcgggcgacttaaaccgcccaagaggacgcatgtttgcgctcgccgagcagggcttgctactcgtcttctacaatagaaagctagcgaaatccaagcgggatcccggtgcagccgcgccgctttgcgactgcacaagctgctcgtcttcgatagcgcgatcagccgaccgtcgcgccgagaacgtccttcgctgagcaaagtcagcacgtccgagttcggttcaaagccagatcaggcgctatgctcttgaggcagtcagcaccgtcgccgtcaagtgaaccgtcgtcgatggagacagctggttgacgaaaaggcgacggggcgtctgcccgtcggtcggcgccggaggtcatttacgccaaggcgcgtgacgttgacgtcagtcgccgtaagccgcgcgtaaagacttctaccgcggggctgccctgtcgcctcagccttcaaaagcaccagtgctcggccgacatcgcccatctctcccttctcccaccatctcacccacgaaccaccaacaccttgccaaacccaaccaccctcacacgccctccatgcccaacaacaactctgtcaccaagatgtacggctctctttttctctcttgcgaacggagcggaggcgttggcaaccccctcgcctccgccatcgcatctccctccgactgaatcttcgggctgactccgccacacctgccgtcccctttttgcagcctctacgagcccgaccaccgctcgaccgactgctacgtcgttttcgtcaacggccctgaggttcgtccaatctcgcgcctcgagccagccaagcccgaccgccacgaatgagaggctgatcacctcttctcttctcttcctcttgcccccccgacagtacaagaagtacatcgaggacaactcgtcggtcccgctcgtcgaggtcgtcgactcgttcgaagtctttttctcgggcacgggtgcgaccggcacgctcggcaaggcctcgaagcagcagctcgagaccgtctttggcacgagcaaggacatcgacgtcgtctcgaaattgcttgagctcggcaagcttcagaagggtgactccatctcggacaacgcctacggcgacggcaacaagtcgcgcggcacgatgcagcagggcgtcaacggcggccgctaagcagcagctcccctctccgctccccctttatgcatctcgtcacgcttccgcaatcctctgtctagcacccacccccccactactgtattttgcatgagcctaaaacgcaactcttgttgcagaggtcgggcgggatagctcgaggctcatggttacacgggcgcgtcgccgtcggtgacgggcgttgtcttacgctcgtcagtcagctggccgagagggtcggccgaagcaatgtctgtaagatccccgtaggccgtccggagttttgatggcgcgtccctgatcgaggcaaaggtgtcggcccacgaccgagcctcttcctcgccgtcctcgccgtcaaccttgaggtcgctcttcgcgtcggcggctttttggctaaggctctgggccacattcgaccaggtcacttttgcaagctggccaagggccgacttgccgtcctggccaatcggcagcgccacttcgctgttgacctgtccttcgagcagcgcctgctggccgacaaaggcaaagcgagcctgaccagcgtcgtcaaagagcgggccggagccgacgggtgggagcgtcgagggaatggcagcctgcgcgtaacgatagatgaggaggttctgattgaccgtctcaggcatcctgtgagcggacgaccgtggcgattgcacgagcaagcggtcagtgctctagcgctcagtcaggctgctagtggcgaggtgttcgagtcaaagcacctgtggtagagctcctcggcgacccacatcttgccgccatactggcccgcgaggctgccgatgcaaaaggccgtaggcatgcccatgccgacggcgacccagtcgcgctgcttcgtccagatgccgcgcatgccgccgcggagcaggtacgtcgtccagccgcctgcggcaacgatcccgccgccctgtcgccggtcggtgaagcaccacgggtcagctcctgatggacgtcaaacgcccggaaacgtctgcctactcacaaccgtgatcagcgcgagttggcgaaagacattctggtagatgaagtcgacctcgtcttgctgaataagacgctcggcgacgaatcggtcaaccgtttctgccgccggcggccgagtccagagtgggggagcgtccagcagactcgtgctcagcggccggaagtcaagctcgggtggtgttggggcggccattgcgagagacttcgacaagacaagacaggtagctaatgctggcgacgggaggatggcgagcaaggccgagagacgaagctgcgatgacggtcgagcttcgggccgggcggaggagctctcgagccaccctcagaccataacctcgctccctctgcctttgcccgcccatctgcccttcagctcgcccgagctgcgctccttgccctctagatcttctcactggactcgtaggatctctctcgtaccggccaacctctcatcggctcgttcctctctgtgcgtccgaggcagcacgcacgacccgtcgcgtcgacctcgaggcgacgtgtccgaggcttacctgaccgacagctgacgatcttcatcccggatgacagctttcattgagcccccgactccctctgctcttgcaggtcatgccatcgactacctgtctgcaatttctctcggaaccgctgccagcggcggcccagccgccgtcgctcatgccgttccatatcgcctactcggggccggctcccatctcgacgtacttcctccctcgaccggaaccgatcgaccctcacgcgccgtcggccgagccactccttctgagcacgttccgtgggcggcaggtcgtcggccagactctccgggtgcccgacggctactcgggcgtcgtcctgcgcgtgccgccgccgccgccgccgcccgtcgcgtcgcgtgcgggcggcagcagcagcatgtcggccgcgctggacccggccgcactcttcagcacgccggacgtcgcgccagaagaggctgccgatgcgagcaagtctggcctccggcggtcaccgaggaaaaggatggcgcctgccgccgccgctcgcccgccgccggcaaagcgggctcgtgtcgcggccaagaagttccagctcgacgactccgactcggagagcgacaacgagccctcggcagctcctgtagcgctcgaggcgatcgaggccacgccgtcgcttgtctcggtcgcgacggcgctcacgacaccgtccctgtcggctggctccgtcgtcacgcctctcggctcggtcgctggcgacgaggtcgtcattgctgctgcggaggcagaggtcgcggaccgcgtgcaagagacgctcgagatcgccgagacagcggctctggacgatggtccggtggtcctcgaggccgtgctagagatcgagacgacggtggaggcaacgttggcggtcgcttctcctcctagcgtggacgctcttgtcgaggtccatcctgccgacgagccttacaaggccgaccagctcctgccaagctcggcgacagcagccgtggacggatccagcacgaggcttatcacgccgctcagcacgttcgagacgatcgcgctctggacggcagacgatgcggtcgatccgggacgggacgagctctaccgctgccttggcaagggcggctggctagagatgagccgaatcatccacgacgaggaggacgacgactaggagaggtcccgctggcggggccaggcttattcgaagccctttccggtacaagggggtcatgaagtacaaggatgtgagggagcgttggccaggggtcaggcgacgtaagttgagaaaggaggatgggaagcgcgcgcgccaaagggctgtacaggacgatgtgggttcaaacggccgagtcgggagggctctcggtccgaccgtcgtgcaggtggacgaccggagccgcccggagaagggcgttgagtgcgacgtcgtgcaaacgacgagccgagatgcgcaaccggcaggcgagcacagtctcgtccgatatatgctgggcgccgagcgagaaggcaaggctggccagccaggcgaacaggccggcggtgacgaggtgcgccagcgacgacagcaacaggcaagcgcgatggctgtcgggccccagcggcgacaccagcagataccatctcgccggaaagaaccaggcgaggatgctagcgaccaggctgacgctcagctggggcgtggagagccagcttatggcgttcggccagagagcacgttagaagcgacccttggcggtaaacctcgtccgagcgagccgccagcgacgtaccgagagcagacgacgaccgacaatgagcagatggttgacacaaggaatggagtcgccaagtagtctgtcgaagggagcaagtctcagtacgtcgctcgctccggggagagggaggacggtggtgagacttacggttgtcgacgaatgtgaccgccgcgataccagcggtcgtcaagccggagccggcgaggatgacccatctgaagatagggttcgcctgcggtagcacttcatcggcaaaaactgacggctcgacgaggtagctgagtcccgcgtccaaagaagatgccttggtcggctccgcagccgattcggacgcggccgtcgcgcaagggtcgtcgacgtccgcccaaacgatgttgatgaccgtcagaacgaagagcacgacggcgacgaggccagacgctcggaggacggcgagctcgtaagctgacgtcttgagcgtcttttgcgagctcaactggaggagcaggatgaagtgccgggctgcatacacgtgtgaggtcggatcagccgccgctcgacataagctcgacaagagcactcactgccccaaatgccggccgcgcttgcgccagcgaaacgctcgaggtccttgacgccgagctcgccatgccggccgtggaagagggcggctgccttgggtcccgagccgagaaggaggccgcccatgcggaagagaacgaggccgagtaaggtcgtctgggcaaggacgtcccagctggcgatggcggcaggcgagatgccgctctgaagctgcacggtcaggccggttaccgacccggcgtcggatgccgtcgaagagaggcccgcgaggtgcgagcggaggtagagcagggcggctgcgagcaagccgtgacaggcatctcgtgcgtgtcgcgcccgcgagttgctcgtcggccgaggcatggtcgtcggaggcggcgaggcgaggaagactggcggaggcgacggtgacggtcgagcggacaccctggcgaacgacaggtgaggttgcgggcaggccgcctgctgctgtcaggatggatcgcaggcggctggctgccgttgacagaatgggatcgaggtcgacgcgacgcgaccaaacagcagctcgggcccacgaggagcagaaaggggccggcacgttcgactctcaaaactgtcgaacccgcacaaaattgaacgctgccttcgtacgcttcgtcaaacctgtcgccagttgcggacacgagagatgggccgcactcaacaggcaggtcctgaagccgtcggtgcggttgatcgtgccagaaaagctatcgactttgtcaccgggacgagccagattcggctcagcggcgccgatggacgatttcgatcccgtctccacgattagttcaatcagacacgtcggcagctgaatgcagggcatgcgattgagagggccgacgcctgcgacctgctccggacgggcgcgtcgggaggcgtcgcatggtgaaagtgtcgcgcgaagcgcatggagggtctggcgggccggccacgaaggacgctggtcgaagagagggactgggtgcagcgaagagagtgttgagactggaagagtgagaacttcgatgtcaggcgagatggacgagaccgtccggccgggtaaggcaggccgccggaagacgctggatcgaggcaatgaggtcggcaaaggttgcccgcacgaggtcccggagtatgtcgccgagcgagacgtcctgctcgtgtagctgaccgtcgccgccgagtttgaggacaacctcgtctgccgggtcgatgtcgtctgaaagacatgcgtaaaggtcgacgaggagccaagtcaggccggcgaggaaggtccagctgaggttgtagacccagcgagcgagcttgcaaagcacgggggccaggcctggagggaagacgtacaaaagaacggtcagtcggtcagaaacagacgattcgtctaaacaggagagggcgagacgtacggcggatggtttcgtctgcatgcggctcccagacaccgcatgtcggagcccctcgctcgtcgagggcgtaggtcatggccgaccggtaccagaccaagacgatcagagagagaacaagcgagagccgaggcgtcgagatcgcactgtcgagattgtcgagttttcgtcagggtcagttggccgataatggtgtcgcaagaacaaaggacgaacgaagggcgaagcaggagcggtagtgagcacaccaggatgggcaggaacagcgctgctggctggtctgaatgttcgaaagaacttaaggacgtcagtggacgggtcggcaatggtgacgcggaggagaggccggcgcacaaccgaggacaattgtcaacgcagcggcctggataccgatgacgagtccgagaccgaacagcgccccggggacaagggtgccgctgatgatgagagcctcgactttggcgccctccagctgcgtgccgtcctgaccgagctcgagccgtcggtcaggtcgagggacgtgcgcagcgattgccttgtctgcgagaggaccggcagccgcctcgtcgtcgactggcctactgtccgctgcgtcgacaggcgcgcacgattggtagaagagcaaggcgacgagtgcaaatgagagtccagcagcggcgccggtgccgaggacgatccgtcgagtaggtcctgaaacagcgtgctggcggaggcggctgcacttgactgaggacagaggcgcagaagaggctggcgtcagcgaccgtcgtcggaagacaccagaaacccgacccacaagcccaaagccctgcgccgagaaccgccgacccctgttcgaacgccgcgagcccgaggtcggcaaggccgccgccgcggaccatctcgccggcgtcgtgagcgccgccgaggctcaggagccagggaaggtggacgagcaggagggcaaaaaggctggtcttgcagtcgatgtagagctggaggagggcgtcggagggcaggccgctggtggaggcgaggagggccggggccggcgagaaggagctggtgacaggaggtcgagagtggtcgcgctggagccggacgagcgtgacgaggatgcctgcgaggaggacgtgcagcgtgagccgaaggagctgaacggtcgagcttggcggccgcatgatcggatgaagctggcgagctggttcgagggcgacaggagaacagacgaggcgaaggaggcgagctggagccggccgagcgtgacgcaatagggctgcaagagggagccgtcaccggtgtggaggattctgaagggagagtcgacgttgagaggaaaggcagacacagcgtccaactgttttgagctgagcgggctgaaagggaagtggatcggaggagggcagcggccggtcgagtgcacgcgcgaagggccgggcgaataaaggggcgcgcgcagaggcccctgtcgtttgcccgctcattccctccagcgagctagcgcgtccttccttttgttgtcttgctgagtgtcggcgtcggatagacgaggaaaaggtgcaagggtacgttcaagtacagctctgtgagccagagtgaggggtaatgggagagggaaggcgacgattggggtttacagacagcgagcgcgaggcgagcgcttcgcgccggaggggtgaagggatggcgccgacgcgagctggttgatctgcggtctggcctacgacatggctcgagccctacgaggctgtgtgagagacggagatgcgtgggtgcgccagccagtgaggttcatgatcgtgatgcggaagcagctggaggcgttggtcgagcgatcgtctagagggcagccttgcccgtgatggccgtaatgagccagtcgaggccctgtatatgacaggatgacggtcagctccatttatcacggtataaagacgaaaggtcaagcaaccgacctcttccaggccttcgcccgtcagcgcacacgagccgcggacgctccactccctgctcttctctccgccggccaagccgaggcggtcgctgatctcgccgctcggtagtgctccggggacatcctaaaaccaaaggagaactcgagccgtcagccttcggatgcgcgtatcgggaagagctcctcggatcgcacctgcttgttggcaaagacgaggacgggaacgtttttgagctcctcctcggacagcatcgtcagcagctcggtccgcgacgtcggcagccgtgcgacgtccgaggcgtcaatgacgtagatgatggcctgcaggagagggccgcagctggagttagcgggagttcgactgcgatgcgcgaggaaggtgggaccgacctgcgtgttggcgtagtagcatcgccagtatggcctagggggttacagaacagggtcagtgggtcgatactgatctgcagatggcggtagacactcaccggatgctcgattggcctacgagacggcacgggcgagggagaggtctgtcagctgggctgcgcaggagagcaagcatgcggtgtaaagcgacgagggctgacctccgagatcccagacctggaacttgatgttcttgtactggaccgtctcgacgttgaagccgatagctgaaagttcaggaaggcatgtcagccagctatgggagagaagcggaagctaggagccgacgcactcggtattgtcgagacgacctcgccgatctggaaggaacgagaatgaggtccatgtcagcatgctgcctcctgccgcactgacaaggccagcttgagcatccagaaagcaaagccgttctgccatgtcctctttatcctctgaaagccgggccaagcccttctcatcacgccagcaaagcccacctgaccagactcggctccagccgcccgccgttctcccggctgtcatgcctaagacgtacctgaagccggtagaggatcgaggtcttgcccgaagcgtcgagtccgaccatcaatatccggacctgagggcagaggccgaggagggcaaggcaaaggcaggcgatggcaggcatcagctggcgagctcctggcggcggcgcgcgcgcggcggggaggcggacggacctccttgtccttgccccaccaggcgagcgatgaaagcgatgagaagagggacgagacagcgagtcccatcgttgcagagcgggacgaggacgagcgctgttggagaggggtgaagaggtggggaggtcggtgtggaggtcggcaggccgcgagagcgagccgggacagcagcagcagcggcggcggcgggcggcgcaggcaccagcagcagaggcaggcgcaccgaccggctccctcgagctctctcaagcacactaagcctcgggtctaggcagggtgcacaccatgccgccgcctatgctgcgtgtgctcgagcttgcgaagggatcttgcgatggaggatcgtcccgagccggtcggccttgtcgggcatcccctcgaattcggcggcagaaagtcgtcgagagccgtcggtcgtcgtcgcttcagctcacgcaacctcgacctcctctcctcctcgccacctcttagacaagattttaggaaccatgtcggacgccgtcgcctctactgcggccctcgatgcccgcaagggtatcaccctgaccgcggccaagatgtacccgccgttcaagtctgagctcgacggcgccattggcagcatcaagcaggccggaggccagctcaagctcgtcggcatcctcggcacgggcaaggacgacgccaagacgtacgctgaggtgcgtgtaactttggcctgacgctcttgggagctgaacctaatgagcgatagctcaattcgctctgctcctgacctgacttaagccttcgcaccctccctgccgttcgacgctcgcagttcaccaagcgggcgtgcgaggccctcggcattacgtttgacctccggctcgtcggccaggccaacgacagctcggtcgccctgggtgagggcgtcgaggaggccatcgtcgaggccaacaacgacgacgccgtcggcggcgtcatggtgcggcctgcgccgtctccgctgcctccgcctggacccggtcgttgactgccttgccctttgcccacttgccgaccgcaggtctactacccgatcttcggaggaacccaggaccagtaccttcagcaggtcgtctcgcccctgaaggacgtcgagggccttaaccaccagtttctcttcaacctctaccacaagtgcgtgccttcctcttggcccggcctactctcgctcgtcggcttgatctgcgctgaaacgcccgtacgccgacagcatccgctacatctcgcccctgacgctcaagccgccgcgaaagtctgcgccggcgtcgggctcgggcgagtactctgacgcctcgcccccgccgggaacactcaagtccattctgccctgcacaccgctcgccattgtcggtggccccctcttctacgaatatctgaccaaaactgacgccaggcctgctcaacgatccctcgtcgcaggtcaagacgctcgagcatacgaagatttacgacccggcgctgccgtacggcgaccgcgcacggggcaagacgatcacagtcgttaaccggtccgaggtcgtcgggcggccgctcgccgccctgctcgccaacgacggcgctcgcgtcctctcggccgatatcaacggcatcgtcgagtactcgaagcggcgcgacgtggccgaggcggcggcggccgcgcagaaggcgggcgggagcgcgagcttcaagccgagccatgtgacgcggccaacggagctgacgctcgaggaggcgcttggccagtcggacgtcgtcatcagcgctgtccccggcggtaagttcaagatcccgacgggccagctcaaggagggcgtcgtctgcgtcgacattgctggcgagaagaactttgagcccgaggttgcggccaaggtgcgagcctcatgactgaagcgcactctggcgagaccgtcactgactttctttctccttttccgtcaggcaagcgtctacatccccgcggtcggcaagctgacgatcgccatgctccagcgcaacctgtgcgtatttcgcgcggaccggcccgagccaaccccactcgccctaattgactccctttgcctttttcacagcatccgcctgcggtcttaccaggagatctcgagcagagcactcgaggctgctgctgccgccggcctcttctagaattctctccctgtttgctctgtctacatccgggtgtgcacctcttgatctatctgtctgtccagatgagtcgacccgcgcagtaagctagcaagtgagtggatacagtggttggttccttccggggcgaaatctatcgctctagatcgctctaatagtaggaagaggaggtgacctctcgagtcgtgcagggagaagagaggtgcgggccggtgagaagaaagtcgaaggaaccgttggggcatcggcagcgccctactcagccttggcgcccgcgaccttgacgcgctcgtcgatcgaggcaaactccttgtcttgcgggcccgaggccttgccgccgaagggcatttgagccttgatgacccaggtcgagggcaagctccagagccggaggacgtcgtcgctgatgaggttgccgtagtgctgattggcggcaggaggatggcaggagatgtcagccggcgttgctgtgcgggcatgtcaaagttgcgcgatgaggacgcacctggaggttggcgccgagaccagcctcgttgaaggcaacccaggtgaaggcctgggcgatgcccgacgtgtgctcggaccactgcgggaagtgctcggcgtagagcgggatgtccttctggcacttctcgacgggggctgcaaggacggggtcgagcgccggatcagcgcgctgcctcgaaaaattacagtttggtcagggggagacgcacccttgtcctcgaagaagacgacggtgccgtacgaggcggcgaagccgtcgaccttcgagtgcgacttgttcttttgctcctcgtccttgaactcctgcttctgttggaaggcagtgcgggatgtgcatcagagaccgctaacaactcgctcgagctacaacgacttgacgaacctcgagcttcgaccagatctaaaagggttcgatgggaacgacgtaggggtcgtaggaataacgcatcagcccagcccgatcagccgtgttgcgcaagcgcgattaagcagagtaggccacgcacgaggtcccaaagcttctggtgctcgttgccgaagaggacgagcgcgcgagcggtctggttgttgaactggcacccgagcagccgagcgaacagagaggcacgtcagctcgatgcgctaggatgagcggcaggacatcgaaaggaagaaggtgcctcaagctggcgaagcgcagctcggcgagcacagcgacgacacaggcagccagcgagggccggaagagaggtgcgccatgggcagtgagggaagagagtgacgcactgctgacggcgtctgcttgataacctccttgacgagctcctggatcgacgcgtcggtaacgccctcgggcagctggcggttgagctggtaaatcgaccggcgggcggtgatggtgttgaggaaggccttggacgacatgctgtgggcgaaagaggaagggaggcgaggttgaaggttggtgttagaggtggtccgagggtggaaggcgtcggctcggaaggaggagggcggccatcggcgaaaaggggaggcatgacgcagacgcgcagacccggaggttcccacgagctccttacgtcagccgaccctggcccgtctctctcattagagcctcagcagccggccggccgacagcacagacctccctggtacccatttatcgcactctcaacccgcaggccatgccgttcgaccccaacgcaccggcctttgtgccgaggtacgtcctcttttgcctgagggcgcggaaggccgggtcgcatgacctgaccttcctcgcgaaagagatgtgccttccctccgaaagcaaagcgagaagggctgacctcaacttcgtctgcaggtccttcactagcccgtctccgcccttgccagcaccctcaccaattccgtcttcatcagagccgcagagagcgccggcccggaagcctaagccaaagaagaagaagtcggccggcgcccaggccgggccctcgtcgtccgctgcaccttcatcctcggcgccgcccaaggacggacgggcaagcgcctctgccgcccttccctcgttctgcgagcaggacttcccttcgctcggcccgcgaggaggagcaggagctaagacggacggcccgtcatcgtcggccctggaagcagcgctcgctgcttcggcgcctgtcgctgctcctgctcctgctgctccggccccagggaaggccggctcgtgggcgtctgcagcagccaaggcgcaagccattgctcctcctccaagggagaagtcggcagccgtcgtgaagaaggagaaggaggccggcgcccgctccaagaagcagtctgatgatggcgaggcgtataggaaggaagggacagaggaggaccagacgttcacctacccggtcgaggccagcgcatctgccccggtcgatctgccagcagcggcggttaagcctcgtcggtcgcctccaatgccgtcgccatcgccgaagggtttctcgtacgctacggcggccgctgctccttcggtcgtgccggccaagccgcgcgcgatcccaacaccgaccgcgcctcctgccgcgcttgagcaggaggctgagacgtccacggctcaggccgcattagacgagcctctgccggccgatgagacccctgcatcctccgaggcaccttcgacacccccgccagccccgtcgccggagctggctctttcagcatcgtcctcaacacccactgctccggaacccgaaccgacggacccagcaacgccctccaacaaggagcatccctctcagccggacgctgccgatctcaccccatctccttcaccggccccagtcgccgacacctccgccaccgcgactgctccttctcaatcgacgccagacggggccaaggctgcgccttccgtcaacccgctgcagtcaaacggggccacgacgccggctgcgtccggcgaggaggcgacttcctcggtcgcagcaccttcggacgtggtgcccaaaccgtccgccactgcgctggacgagttgaccacgcccgaggcgtctacaactccgacttcgagctcgaaggaggtgcctgccgcgcagccgacagaggcgaccggcgagaacgagtctgagtcgacagaggacgaggacgagtcgacccgcagcgcgatccacgcggccatcgtcgctggcgagctctatctgctccagcgtatcttctcgtcgtctgacgtgcgttgtcttcattctctgctgtttttttacctcgtgtggacagtgctgatcaagtccatgacgcttcctttcaggcgtcggccttctccttggctaatggaccgcttaaccctcacacgctcatcgcccccctccatctggccgcatcgcgcggtcacctcgatattgtgcgcttcctcgtcgatgagggtggggcagttttcgagctcgaggatggcgagggcgaggtacgtcgtggccctctttcctatcattgcgcggccgatgctgatcgatctgggccctctccagacggccctgcacaaggcagccctgaactcgcacatccccgtcctggcgtaccttctcgccgaccggcacgtgttgcccttcggatccgaccgcgagggcttcactgccctgcacggcgcctgctcgaaagggcacaccgaggcagttgacattctgctcgagtacggtgcgggcggctatgacccggaggaggagctcggcgatggccggcagagggggctcgaacggcaggccaaggctggatggacgcctcttagtcagtcacctctcggcctgtcatcctcaaacgaagttgtggctgacttgcaatttgtctgctacagtgtgcgcggctgcgaatggacaccttgccgtcgtcgaccgtctcgtcaaccaggccggggcggatcctctcattcgctcgatcggcggcgagacggcggccgacattgccgagggcgtctccaacaccgagattcacgaggtgcgcccgtcgcttaagagccgcttcgtaagagctagaggaaaagctgacacttggcaccgcctgcagatgctcgagaaggccggacgcgagcgcctcgccaaatgttctccctctaagcctgctgcccaggcggctgcatcctcgcagaagccactggtcaacgagccgacgagtatgtaactgtcgttcccttgctgcctgcactttgactgacccggcgcgagcgccccctgcagagatcgtctggcagaaggacgccgacgtcaacgattgccagcgttgcgccaagagcttcggcctctttgtgcgcaaggtaagctccgacccgtctgcctcgtcttgatacgagagcactgaccgaccctcttctcttcacggcctctcagcaccactgccgacgctgtgccaagatttactgcggatcctgcagctcggcccgttcggtcctgccgccggcagagatcgtcctcagcccggacacgcccctgtcggcgctcgcgggcgaggcagagacgaagcaccgtgtgtgtgcgacgtgcatgaacgacccgctgctcgtggcctggctggccgagaaagccgcctcggacggcgaggcggcagcataggtagacctgaggattcgctggacttgcatatcacggttgtaaaatgacgactttctcgctcgctttggcttttgcgcaagtctcacagccgcctgagcaaatgtccattgtaagtaattagataaagacagccatctagacgggcggagagagatggaggagtcgggctagccgaaacatctaaagggagaaaagtctggcaaggaaagaactgatcagcgaggtttctgcaaaggggcaacgggcacatgcacgcactcgaaagagcactcaatgacggtgcgggctctgagctccttgtccatgccgtcgacgagccgcgcgacgccgtcgaccatcggctgcgggccgcagctgcagactgccaagccgccaccggttggtgtccgctcggccagcgagcggagaatggcgccgagatcgggccgagcaccatagacgacggtcggtacgacgcctgcctcgcggaggtgcttaagcgagtgcgtcgcggcggcggccggcgggaaggactgcgacgtgcagtgcaggcggatgctgaggttgagcgtcgggatagccagcgaggcagcgaggatatcgtgaaagtacggcagcatgtgctggaggagatccacctcgcgcaccgtccagacgagctcgactgaggtcgtccggccgtcgcccgaagtgcagtctttcaggaggccctcgatgacgctgagcgcgtaagagatgcccgaacccccgacggcaagcaggacagacgagtaggtcgaagggatgaagttggcttggccgtagggtccggagacctcgacgacaactgcgacagggtgggcaaggtcagctcggaagtggaggtaggcagagagacgagatgctcacctcgcctcggtcggctatcctcgtcctcgtcgtcaagtcctcctgcggcgcggagcagcgcgctcgtccaatcaccggtgcacttgatgacaaggcgcatgccgtcacttgagtcgacagcgctagcctgcaagggtaggaaagcctcctttttcagttcagatcgcagtcgggaaggagactaggggagctcacgatggtgaacggatggctttcgagcccaagactgcgcgcgatgaggcggtcagcgtcgaggcggcaccggaagagatgtagcgacactcacaggcccatgcctcccgagaagacgcggatacgcacgtgctgacccggaaaccagcctgcagagtaattcaagcgggtcagttcagggaatcacgaggggtgtcatgcggaggccagacggacctcgcttgacgtcggcaatggtgaggatgacctggaaggacaaagatccagtcagtgccggcctcgagtgtcgctgacaagaggaaggagacgtactgtgcgcgcccctttcaccggcgtgagctcggcgacgtgcaggcggctcgtcaagaagcggtaggcgtagctagcgaatgtcgcaaggattgcgaccatgaggaaggggaaaacggtctctgagagggcaggattgtcgctaccggtcagtcataaggcagcggaagaccgcaaaggctcaaaaggggacgcactcgagtggaaattaagcccgccgagaaacaggacgaggccaaagtggtggcagatcttgaagagccggtaccagcgtcgccggatggggccgcagctgacgaccatcatactgagaagaggacggagcaaaaggtcagcccagcgcgtcgctcgtcgggaagcgagcgaagaagcgtcgcgtaccaggcaaagccgccgtatgatatccaagccttgatatttacgaggtcgcgcctgaggtaaagcgagggtggggtcagcgcaaagttgagccctctcggtcaccgcagcaggacgtacatctgcacgtgcatcgtccccgccttgtcaaagacgatcatatatgagatgacgtgcagcgtcgtgatgaggaaacagagccgggcgagccagcggtggaggactgcaaccgaggcgtagccgacctggaggatcgtcccgaggccgccgaccttccagccgagagcgaagacgaagggcagcatcgcgagaggaacgaagcctgcgagagagggcgttcatgaaagctggtcagactaggaggtcattgagcaacgtcggtcgaggctcacttaccggtgcgcgtggcgtcccacagatagtgcgactggacgaccgaggtaagcgtgacgataagagcgaacggcgcaaagcaagcgatctgcttgagcgtgacgttgaggccgggcacgcgccaggtgtagtgcagcaggaacgacggccgggggaagcgagcgagcggcgtcgacgctcggacgagcgagggcgccgaccagctctcgttgtagtgcttctcggagaggccgacgggaacgaggtcggtccggtcctcgaccgatgccgcatcgtcgtcttcgtcgttcgacacaagcttcggaggcgagacgcgctgcgccttactcgaggaagcgctcgagcgcgggcgcgaaatgcgcagggcccagccgctccgccagccgccgcgcgacatcctggcgaccgtccagggcagctgatagagggcgtaggcgagaaagaggagcgagaagccgagcatgagcgcctgcatcgccttgatcgtgccggcattgatgtgggtggcgtggctctcggtgtgggtcgagtcctcggtgtgcgatgaggaggagggagacattgtggtggttagggagctaccgctggcgagcgagaggaggctcgttgtcgtcccatcctgcgtcggagtaacggccggaagcatgctcggacgaaagatggcggcggaggccgtcgacgactgctcgtcgccggcgaggcgatcgactgaggcggcggcggccgccgtcaccggcgagcccgagcttgtggccagtctgagcagcgttgttaccgtcggctcgggcgggagttcgaacgtcagcgtcgccggggcggccgccgactcagcgccgtcgaacgcctcctgccggcgctgagcgagaagggaggccgcgagaccggcgtgttgctgccgccgtcgctggtgcgagaggcgcggcgcgtgaaaggcttggccgtgcgcgttcatcgaaagaagagagacgagaggtaaggcggaagagagcagggaaggatgactcactcgaggccagctcgagcgcagagagatccgacgggagttgatggaaaggaaggaagggatggcacacgctcaatggaagtggacggtcagctgaagcactcgtcgccttttggcggagcgagctctgcctcttgctcgaggtcaagcttcgcagaccttcgccatgcgcgggtgttcgtctgctgccgagccgagcgctcgaccgccgatcagcgggcggatgtgaaggggagagcgacaggggagggcgaccaaggacaatggcagaggaacgcgccggcccgccgaaacgccggccgtgaaagggggacagggatggtcgcagacaaagggggcggcagcattggcaacaggggtgtgaggacgacgccaaaacctgcgagagcatcagcggaagatcggtaagtaaacgagctgctgtcgactgtcgtcgacggccagcgaggaggaagtcgaggccgttcggcgcgaggcgcagaggcgagctcgaagacgggcagcagcaagacgacggcacgaccgggccagcccctgaaaatcagcaagccagactgccagtgtcagctcatctcctaccggtatgagctcgaccaatactgctctgagctcttgcaaaactgtcctgtcgcctgttgcccgtcttgatctgctcgtccttcgaagcatgtgccgacggctttcaaactccgcccgagataagcctcgctcgcgggacgcgtcgagacgacaacgtcgcttgaccctgaccagcattcgacagctgcagcacctccaagatggcgaccggaaagcgcaaggagactgaatacccctcgagttggcgcaacatgatcgacgcccagttcgaggagcagcacagtccgtccgcaagctcactctcccagcgggcgcacgcgacgcgtcgtccaccgcaccctgcacctcgctgcctgcgcgatcagaaagcagcaccggctgacagctcatgtacattcctcttgcgcagccgagatcggcctagaggcgtttgccaacttcatcacgccgggctttgcgccgtctatgtgcgacgaggccggcgactgcagctcgacccccgcctgcacgcctcggctgacgcctcaacacccgccgcctgccctccagacccgaactgctcatcctctgccatctcgctctgcaagacgcgacatggtcgtcgacctcggccgtcgagcgctcactccttccgtcgacatcggcctctctcccgctcccgcacacggcgctcaacctcctccggcgcctgctcgcggccaacacgccagcgatgctggcgcgggcgatgcccaactgcaacccgcggctcgagcagtggcacgacctcggcgagctctcgctcctcgaacgcgagggccgcaagatgatgcgctggcacgatttctgggagggcctcgagcgctgtggcgggagcaagcagaaggtccggcagggggctgagccgccgacgagggaggaagacgcccgggcgcaggaccgctggtgggcgctcgccgattgggccgtcgacctctggcagaaggacctcgaggccgtctgggcctggcggggtcctgcaaccgacaacaatggtgcgtcagaggggccctgcgcagtcgtcgatccggctgacccgcgactcttccccttccaaggcgccccaataccactcctgctcgcccagatcccgccgacgaacgcggccgatcccctcgcccagcgctgggagctccatcggccaatcatggtcttcctcgccgccttcgccaacatgccgccgctcagggcacctgacgccgagagcgaggcgctcgactttctcgtcctcccgaggtcggccgatgagcttgcccgtgcgcaatgggagcgcagacgacatgtcgcgctgcggttgctggacctggtacgtctctgcgctgccagcgtccgcgctccgagctgacgttctcttttcctcgcagctgctcgccctcgccacgccgacgattgctcacccgcgcccgctcctgtcgccctcgcggctcgtcgatcagctgtcgtcaaagctcgccctcctgccgacaccgctgctcctcgtcatctttcccctccatccttcatcggctggctcgccgttcggccagcgtctgcacccgctcgagttgcagctccttgggtcgatcctgctcggctgcccgatgacggccccgccggacccagtctcgttcgacacgctgctgctcagccacggccgcaagactgcccgggccgccgtgctcaagctcgtcctgttccagcagctcgtcaacgctgatccggttggcacacgcgcccgtggcccatggaggaataaggtgctcaagggcacctgggtcgacaagccgggaccgggcgagggctggacgcttgtcaaggctgttgccgagggcgtcgccagtgtcgttgatggatgagcgctgcctttatttccctctcagcgcaggttgcaatacgtttgttcatggaccgcgcatagcaatcactcgccgtacatggcctcgacttcgtcgaccgccggcccgtcgctctcctgcttcgggatcggcccgagctcctcgagctcctcaatgtcatccgtcagctcgggcccatcgatgccgttgcccttcatgacaggccggagaggcgagccgccagacgaccgtcgccgggcgagctggacgggcgacttggtgagagccgagaggtgctgcaaagcggccggcgggtgagtggtcagcctcggagcagcaaaagcttcaccgtgacaagagcgagcacctacctcccagttgttgcgattcgggtcctcaatgtcgtccttctcgtcatcgtcgtcaacctcgcaagcctcgacctcgtcgaccgggctccgcggcggccgggcaatctcgtcgtcgtcgtcctcatcctcgtcgtcttcgccgtcgtcgagtcgggcgcggccgccgagctcgccgatcgtcgcgatgctgctgacgtcgctgaacgcgtcgtcgtcgccgaagagccaggcgtcgccctcgaggcccaggttggcaagcgcgccagagagcgggccccaacccgagagcgcaccatagacggcgccctcctcgggctcgccaaaaacatcctcgagcacatcctcgtactcgctccgccatgactcggcaaagtcgtctggcaggcgcgagggcgagtgcgccgatgtcgacgagacgcgccgcgtccggttcggcgggaagatgtcgttttcgccgcttgagctgaggctccgccggtgatgaggcgcatgatgtgcgtactcgtgatgctggctcgcactgctgccgttcgagtgaaagtagggacccgtgctcgagctcgaccggccgtggtggcccggaggagggttgatcaggtgggcgtagtgcttgctgtggtagaagcggacgagcgagcgcagggcctgctcttgagactagaggcgagaaggtgtcgagatgggaaggatcagctgttgtcaatgatgggcgccactgaacgacgcacgtttgactcttcgagctcgtccttctccatcacgctgaccagccactcatcgcgcaggtccggcctgcagttgaggtagatggccgtgacgattttcatgttttctttggggtcatcggcgtcgcattagtgctggccgcggagaatagagaacgccctgcctgcgacgcacgctgcttccactttttgccgtagtgcgggatctgcgccttgatgatcttgagcacctgcaactggaacattgggtgctggaccttgagcatccgcttgaacgtgttctggagggaagagggccgagggtcaatacggctgagacgatggagccaacgtgtgagcgccacgcacaaaagtcttgtactggttgaattggtggatctggtgcgtgcggcccttgagcagcttctggatgatcttgatccggttgatggccgaaaagaagttgcgccagctgtagtccgagaggagctcaacctcctcgtcgtcgggcgcgcctgggtggccgctcggcgagacggctcgccggggcaccatcctcatcggaggaaccgaaagcgactcctcggccgcttttggcggcgggtgcgacgagtggttgagcatgcagaagcggaagaagctgcgagcggtgacaagtaggtcagttggaggctagcgatgacgccagcgatgacggcagggatgggcgacagacttattgtcgtcgacctcgttccgggccttgacgagctcgaccgagtcctgaagaaggaaggtcttgaccatgatgagtgggcagttcatgtcgagcaacagctggctcaaatgttggaatttgagaacgtctgcagttttaaaaaaagaggcgtgaatggaaggagcgaggaagtcgccgagtggaggcacgtacggtcgctcttgaaccacttcatcagcagcaggatgattgccgagcccgctttgctgataatctccttctcgcgcatcgcgtcaatctctgcggtcgtcggctccggcttcttctcctcttccgctgcggacggcaaggcgaggcgtcagggcaggtctaagcgtggacgcagggccggaaggacgaacggaattcgatcgagtcgaggccgtcgagtcgctcgccaggcgaggcgatcgctgtcccgccaaagccctgcccattagcgccggccggcggctgcgcgggcagggttgccaagatctgcttgaggaggacgacgaccgtacttggcagcgtcgagctgaggacgcccttctgcagggggcgctcggtgcgagcagagtcagctccaaagaccgctggctcaaagggacaaatttgacgcacgtagatggtctcaacgtaatcgagcctcttgaggttgttgacccgctcgccggccttgcgcgacgccttgaagtcgccctcggccttggcccgctcggcctcgtctcggatcgcctcgacacgctttgcccgctcgctctcggccttggcggccgtcgcgttttcgtcgcccaggctgagcgcgggcacgcccatgtcctcgcggatgaactcctcgcgctcacgccaaagctgccagacgccgagcgggatgtacatgtggcgtgaaaagaggtcgtcggcctccttgatggccgccgggatcgtgcgaccgcccatggcgctcgagaaaggaaagatgaacggccgcagcgggtccgtctgccacttctccttcttgggcttcatctgcggcgacggcagcggtgatggcgctggcgtcaacggcattggctgggcggtatgcgacggcggctgcgcagagtgaaagagcgatgtaaagacgtcctcggttgggtcgcgcaagggagcgtggtagtgcggccggatcggaatgggcgcgagtgcctcggccagcttctcgggccgcggcaggtgatgcgtcaaggccaccggattcgaggccggtgcggggtcgaaggtcggatacttgacggacatctcgctccggaagcgggcaatgtcgcctgcgctcgactttgcaaagccttgccctgacgtgaatgagacgaagcaagcgtcagtggtaagctggaggaccggcgtgtccgcgcggcgggcggcacgcacagtccgacttcatctcggggaggtcctcgagttcgcgattgagagttgcgaccttttgcgcatccctcagaccgccgagcgaggccaaaagcaccttccacgtgacaagtaggagctgcgaggacggccagacggatcagcaccggctcggcaggcctcatagagacgcagacggacgcaccttcttcagcgggaaggtccgcagcgcacgctccttcagagtgtccttgagcgaggcaatgatctgcatcaagaagatgagggtcggcgggtcgcgttccactgcgagcagaggggggcgttagcagctgcgcagcacgcgcgaggtagaacaagcgagagagcacgtactgagctcggccgcgagcagctcgtctcctcggccgacctcgatgacaaggaaggccatctcgagtgcaagtccgagctcggtgtcgagcgtctcaatctcttcaagcggggcgtgggtgtgctcgtcgtagccgtcgtcgatgcgcaagctgctcgaggcggcggccaggcagagagaacgcgtgtcagtacgggcccgctgacactgcaagcttacagatcactgactggagtgccgagtgagcctgggcgacagcgccgagattgtcgagaatcggcgccaggccgccgagcgagcgcaaaagggttgagttggtggacaggaggtgcagctggtgctccggccccatcgactccttccagctccctgagcagccaggccaagcaagagttggacgtcagtaacgcgttcgcatgctcgctgctgaaatctactgcgatttacccgagaggacgtagcagagggcagaggcggcggcgatgcgcgccggctgctcaggcgaggtgagctcgtcgagcgtcgtccgcaggtacgcctccttgtctggcgagctcgccgagacccaacctacgcggccatgaaggtgaggctgtccgtcagtcgcccgaaagcctctttgcaccgcaacaagagcccgagacgcactcgagccgtcaaacgatgcttcgaaggctgcccgcttgctgccgaggtgctccgtctcggcgtacgagaagaactcgttgatctcctgcatcagcgtgtcagagtcctcgtagcgaaagtcatactgggttggctgggtagaaggagcaaggggctcgccatcagcatgagcttgctcagtaggcccagctgcaaagagccgaccggacctttggcttgggcggcggtggcggaggggggccgggtgcctggttcgggttcgagacgagcacggccggcagcatgccgatacctccggccggagggttcgtcggcaggccagagaggagcgtgttgcccgttcccgatcgaggggatgacgtgatctctggcggcggaagaagcatggtcgagggacaaggccggcggaagacggaggctggacgtttggaggtgcgagatgatgagggcacggtctgaagacgcggagccagcagcagcgagctagtcgaacgagcccgctcatcatccttcggcacctcgcctctcacgagctctttcgttcgcagtttgagactcggaccaccatgctgaagattatggtcgacgttctgagcagcagactggcgttgagacgacccagctctcgaagagcgccaatgccgcggcgggggctctgcggcgcgcagccgatttcgcacgatcgccgagttcgcaggaaagggcggccgctcaaagagcaaagggcgcggcagatcaagtgtcatccctcggtacgggatccgtcggtggtacagcgaaagctagtcctgaagcagctcgccgtcctgaggagagcaaggcacgagcataagggtcagctggctgcgacagagaaggctgctcagccgactcaccggtcctgttggacgaccgcccatagctggcacgctcggcacgggccgcttctcggctggcgacggtgcgtttgacgacggcgcagcctctgcaaagctctccttgagcttctcgacgacctgccggtgaacctgcgagcaaagagcgggggcgggcgtcagcacctgcagcagcgacagaccgcagagcaagccgacgcacctctcgataaactgagccagtgacctgcaggagcgggccagagagaccaaacttgtggacaaaatatgctgacacgatgagcacgatgagcgtcgtaaagtagagcgggtttgtgatgacggccatgaactcgttgaagctgcagtcgaagcgagggagggggggggaaaggggtccggtcaatcggctaggattctttgcagcaggaggtagagacggcacccacccgagcaggacaagcgcgccccaaacccaaactgggatcatcgcccggctgacgaccatgcttcgcttggcctcgacatagagcgcatcggcctcgcgccggaagcggctctccaggtcagccaatttgatcggcgtcaggacgatgagcgaggcctcaaagtcaaagtcggcgtctggatccgaaagcgagtcggtcgagtcggacggaatgtcggtcgggataagctcgccgttgaacggcttgatcgaggcatacagcggcaggaggacgagcgtctgtagagcgagcgtgcttcagcgaggctgatccaccgagggcccgagcgtcaaacgtgcgatgcacctcgtccttggcccttttgaaggcgccatcaatgtcgtcctcgggcttccagacgcgcggcacgccctgctcgtcgtagcggaagcgctcctcgaatgcgaaacgcagcttgctaagcaggaccgtgtcgcccgtctgctcgtcgacttttgctcgtagtgcgagccacgcccgtcggcggagcgtcttgagtgatgaggcgttctcctcctcggtgcagttgaagcctggatggggtagattgcagagcaggcaagagtcagccattttaagcaatgtcgttgctcaataggtcggtgaccgcactctttgccttggccaggtaggtctcctccgcgcgagagagcgtctctttgaattggccgaggaccttgtcccacaggtcggacgtcggcttgttgaggtagaactcgaccggctcggccagctgcttcttgacattgcgctgcagatagagtcgaggttagtcgaggctcagctcacggcgtcgtcactgagccggatgcgcacctcgatcgcgttgaccatcttacgcgtctcgtcggaccggcactggccggcgacgaggttgatgtcctcctttagcagcgcaaactcatcgtccgcctgccagtcggtctccttcagcttgacggctgcagtaaaagcgtaagcttatcagttgctcgggccgtggtaagcaggcaggaggcgacgcaccatcggcaccctccatgaagcgcgcctcggcgtcctcgcggcccttgcgaacggcctcgccaaaatcgtagtcgcgccccttgagcgcctcgtcgagaccggtcttgaagtcgcgcaggacgctcttgtggaggttcttgacgtggccgaggaagagcgggctgagcgccgcatgaaggacgccgacgaggtcggtccgcttcttggcgtagacgccggcgtggtagcggctcgcgtcacggtcgaagcgggcgagaccgatctcaagccacgaggccatgctcgagccgaggtcagagagcacctcgccggtctcgacccgccggcggaccgttttgaccgagacgaggaacgtctcgaccgcgacagcggcaatttcgtcgcaccgaaattgagcaagcagctcctgctgcgtcggaatgtcgaggtcggcattgctctgaacctggtcctgctcggcagggcgatcgcagacgtcaaggaggtcagcgcacagtggagaggcgaccaagccgggcgagcgacgacagacccagatctgttccatgtagaaagcgacgccatcggccgggatgcgcttgtggtagctcggcttgaagacaaagtcgtcgcgggcccggtcgacaaagcgccgcctgaggtccttgacggccgtctcaaactggtcgggcatcaggactttgtgcggcagcgtcgtaaacgagaggtcaaagtagtcggtcaggttagccgaggcaagcgactccggctgtggaggacgagaaagctgccgtcagcgggacgcaggcagagccgtcacagacttcgaagctgaccttggagagcgacgaccagatgcgctccatgtcctgcgtcaatgtggcctcgaggttggcgagcggcgtcgctccgacatggtcacgaatgacaaacagcaggagcgtcttctctttgcccgaggtctttgcctggccaaagagcccaaggttgacctcaaagaccgttttgaggaggcccatgttggcgccctggtagaggccgacctggtgctcccagatgttgatgaggagcacctcggagctcgcgagcgaaaacagggccgacttgcgctcaaagtcctgcaaagcgcgagcgtcgggtgcgggtcagcgggcgcgctgcgcacgcgatcaatggggaagggccagccgccacgaaggcacgcacctggtcctcgccacgctcacggccgtccgtgccctcgacatccatgaccatgatgggcgcatcctcggccttgcacatccagatgcctgcggcagagatgaggccgattcgcacacgcacgcggtcagcgggcgtcactggtcgcgggagcaggtcgcccgagcttgaaggtagaacgcaccttttgtcgtctgcttgcgcgccttctcgtccatcacgtcaaaggtcgttccgaacaaccgattgagaagtgtgcctgtgcgagcggtcgaacaaaaagaaaggcggcgatgatgagaagcagaaggggtcagccgagccactcagccgggaggcgggcttaagcgagtgacacccactcttgccggtcgactgcgagccaaagacggcgacgacatcgtagccgaagcccttgtcgatcagcccccacttgtcgagcgacgagttgaggttcttgctgcgaggtccagcggtgcatcactcgcgggtcagcccggagctcgagctgcactcgccgccatcgccaacggcctggcgagctttcgatgagcacaccaagcgcccaaacgcacgagaactgcttgtcctcatcgacaatttggagccgctcgcccgggacgccgaccgtctccttcgtgacgatgtgtccggcgaggccgacggtcgacacggagggcgagccggcgctgacgcccgcgagcgcggcctgggcgtcggctggggagtgggcgaggaggtccttgagtccggcatgcgcggccgggttggcgagcgcggcttgggcggccgagacgttgagctccatcgatagagcagtaggatgagagagaggcgagcgatggatgttggagataccccaagcaagcgcggcgacatcggacgagcccaagggtcgatgcaggcccgcagggaacctcgtcacgcctccttcttcgcctcagtagtcggacgtagaagctcaggaaggcgtttgatagacaggtcatgaagtcgaagggagcagagccagtccccatcctcccttgcggaggttgcggcgttctgcacgcctcgaatcagcccgccgccacccctcctgcacccgtcctccttcagaacgtcccgcccgggttggcgccgcggaggcggaccttgccgttcttgagcttctccttgataattgggctcgcagccggccggaacttgtgctcgtttgagtacctgtcggcacaagagggtgtcagcgcgagagacagacgctgcaggtcagagggtgcgctgctgtgacgtaccgtttggcatgaacgacctcggccccgtacttctccttcagcttggccgcaatgtcggctgccgtctggccctgaatgggtggcgtgcccatctcgcccgcccgcccgttcgcctggaccggtccgagccagccccgacgctcgagcgtgccggcgaggccagagagggcgccctgctcgccgccgagcgcgccaagccggagcgagagccagaacatgaaggcgatgaacgccaggaggagggcctgagagagagccaatctcgtcagccgtataagtagcctgagcggctcttgcgagcaaaagaccgcacccgcttgtagggcgccggaggaggcgggttgaactgcctgcccgaaggggttgctcgagcctgctgctgcgcgagagaaggctcgacctggccggccgccgccggcgacgaagccgagcggtcgccgtcgtccgcggtcggcacctgctggtagcctgaagcggagggcatggcgagctgtctgcgactttgagggtttgtcaggacagaggaggaaggggcaggagagggggtctttcgtctgggtggcggtcgcgaggcgggcgagtcgagagagcgagatcggctgaggccaagagcaacggccaccaacgtcgaccccctccgccttcccatcttgacagcaatcatggccatcaacattcgtcccgtcgtcagcgccccgctcggtgcgtgagcctcctggtcgagtcgacggcgggcgggcctctcactcgcctgcccgggcgctcgagctgtcgctccggctcgacgcccgcctcgacgacagggctgacaccggctgcctctgtcgcgcctcacctccatctctagccggctgctgcacgatcctcagtgtctttggcgtcgtcatcctgctaggtgcgtcagcttgccagtgtcgacgtcttgtcggcggttgaggctgacctcgcgcacccgtgcctggtgatctccctcgtgctcccgcagtcgtgcgtccttcgctcgaccaactcgccaaccaggctcgaggctgcctgtcggcaggcctgcccagctaacttccgctctcttgccctccagttcggcatcctgtttgacaagaacgtcgaggcgttgatgggcgccaccgcggatccggaagacggccacgccgtgcgtccctcgccttcctgctcagattcccaggccactcgcttctgcgcgccgccgtctcgcgcggtgtctagctcgtcaaccttcgctaggacgtgctgcctgaccagccaaactgacacgcttgacgcccgaccgatccaggtcgctgtgacgtgttattctgccgccgtgatctacgctgcattcatcggcttctgcgggtgccaagtctgtcctactattgcctctcccacacgagcgccacgctacccagcgttctgacgaacgctactctcctcccggtccagatgggcatccacaaccggtatccgagaggcgtccagctttgatcagagaccttcgcgacgagcagatgagcagcgctcgtctgggcgacgtcaccctcggcaacgcacggtacgataggcatgacacgacttctctttccctactccattttcggcgatggctctcttctacctgctgcgcgaggcaacggcggtggtccttgaggatgggacgacgttcaggctcgactgacgagccgacgtccggtgcaaggcaccccggtggctgaccgtgtcgcatccctctcctgacacaagccaacacctcccgaccgtcgcatccacagcgcgccccctctgtgcgagcaaggctgtcgaagcatctcggctccagccttctctctttacctcccacccaccggccctctcaccgaaccagcgacaccccagatctctcacctcttccctctccgcaaaagctcagcatgcccctccacctctcaccctctcgttggactcggcgctcggcccagcctgatcggccagccgtaacgtttgcgccctcgcccagctcgtccatccgctcctctgccccgtcgggcaagcgccggcgttggcccttctcgtccaaggtctcaccctcgacgcctcgtgccgagcagtcgtctctcttcgtcagcccgacgccggcgccgtttctaaccgtccaagcgcccgcggaggggcgcctcgagccggaggccgccgccgtcgagcaatcgctagacgaggccggcccgacccgaccggcgagcctactcagcctcgagcgcttcctccgatcggaatgggccggggagcgcgaaatgctgcacttcgacccttgggtaagtataggcgtcgatccgttgttttggtagccgctggtcccgttgacttactacaaggcgaacagagctggactaagaagcggcggccgctcctccgacggcgcgagccgctgtccctcgagaccctagcagacctcccaagcgcctctgtgcgtctgcgacgctcgccttcatctattcccatctgctgatcccctttctgcgtcgttctgtcgacaggacgaagctccgattgtcgactcgagctgcacttcctcgtccgcctccctccgcacgccaacgtcgaccctctcacaagccggctcgggccgttacaccacacgcggtaagctcgtcggttgtttccgccgcttgtcgacctcgagcggcttcacctccttcgtcgctagcggtggcagcctcaggaagactggagcacgtaaggaggacgagacgcagaaggtgcgcgcgaacctctctctcccgctgcagaccttgtggaagctgacctccggtccatcagacctcgatcctgcctgaaggctgcgaacgcttcccgtgcccgacgtcgccttgtccgccgccgccctgtcgtatcctgacggccgacgacctcctgccgttccccgacatcgcctcttcgccgtcctccccgccttcgtcgcctttcctgcgcaggctctccctgctatcaccactcgacctacccgctgcacagacctcatttggctcttgcccgtcgcgccggccggccacagccgacgtgcgctccgaaatcaactcggccgcttcgcaccccctgccgatccaagcggtcatcggctcaaagcgcgctactgctcgcttggcgtcgccctcgctcctctcatcgctcagcccgaaccagccgatgccgaaactcgcccgccgcccgcgaatggcatcaacaacctctgcagccgccgccatcctccctcctcggtcatcgctaagcgctctgtcgccccgtcggcaagtcgtcagacgggcgtacgccattccgacgctccaagacgatccgaacgtgcgagcggcggtcgagcaccttctacagagtgggaacgccgccgaggggcgcaatctctgccggctgagcatcgaggttgggaccaaaactgggcgctatgacatttgcgacgagccttaacctaggccgccctacttactgtctaactcagctcctgcgacaccgcttgataacattcaacgaacctctgaagagcgcagcctcggcagattcattcatggcccagcgcgtcgtggctgcctccgcgccccgtcttcgcatcgagatacgcgaccaggcgatcgacaccgccgacactcgtctccgctccgtgcccctctgggccgaagagggacattgctggttgctcggatggcgtctgagcggcgcgttggaggagctgaatcctgagaagcgtagtcagctttgattcggcgccatagcgatggacgagggacggactctgccttgcgccggaggtgctgcatgtggcagagctctctcctgcgcatacagatagaagtcagatgggtgtatcgagacgcagtcacccgtcgcacgcacctccaagcctcgggcagccgctcaggtgggcgggcgagcatcgacgtgatctaaggttggccaattggtcagaccttgaagggcgccgcctgactatcgcagccgcaccttcctgtggtcgcgtgcagtcagcgggatcatcaggttccagtcgatgtaaagcctagggggcaagcggcgccaccaggtcagcgagcgacctgacgctcggctgaggaccgtcgcactcaccgcccccactcgctcggcttgacgcccagccactgcatgcgctcgaccggcaactctcgttcttctgctctgcaagcctgcgagttggagacgcgtcagtagtcatcaacggacgagagtccctgaagggcagcagagctcgcacctgcgtccgactgccaaatctgtagcacgacaggatctcgatgccgtctgggtcgccgtcaaagaggccgtagatgggcgtactacagtgtcaacgacctctgtcagcttccaggatctcgatgcctggctgactgtagcgtggacgcacgacgggaaacgccgggcgagcagggcgacaaagtggcgagttgcgaggtcaggaaagccctttccctggaaggcaatgtgaggctcagtctctgtcggtgccgggcgagtctttggtccagacggcaccgtgacgagaacgacctgtcctgcaccccagcccttctcgcacagcgcctgaaacgtcgcctgcataggatgcgtcagtcaatccagcagcgagacgaagcagccggtgagacacacgtccttctcgatgaccaggatcagctgcggctcggcgtcgactgcttcatcgtcatccgagtcgtccaaatcgccctcgtcggccatcacgacgccgtcgatcgtctcactcggtggtatgagggtcggctataacagcgagaagggcatcgatcagccgaaatgccgctgaggggatggaagcgctggaagtccaactcacgagaccttggctcgagatcattccttcatcatcggcgagcacaatgtcgatgaccgtcgacgcgaacaggcctttgggcgacgcgatctgcagctcgaaggatggtcagcgacacaatgaggcgttgggtcaagacaggcagacgcacaacgccaaagtcccctctgcgcaggccagacgacgcaatcatgcggtcgactatctgcaaagcggagcttagactgtaagcatcctccttaccttgtcccatcgagagaggcggtacgggccctgtctacggccgtttgggagccaaacagccccgggtcggcgtagaacagctcgcgcttcgtcgaggtcgtgccctgatcgagaccgtggtgcatgagggcgagaacttgccaaatgcgggctgcgagtgacagtggaggtacccgcgcgtcagtcggcccaagcgagtgcacgatgcagccggtcggtctcaccgagctgcttgctgttagcacttgagcctcgccgctttggccagatgaagtaccgactggccggcccgcagggcagccgaagcgtgtcggatgaccagggccgactgctgtcttcgaccccgtcgtccgactcggatctggcctccatcgagagcccgtcaacataagcgacaatgtggcggagcaccgagaggaggaggtcctcgatgtaggccttcgcttgcgctctgcgacacagacagagggatgtatgcgccacggtcagccggatgagccttgcgctggagcccgcgagtctttctcaggccgtaccgtcgcatatctcgcgtcataaagcctggctggctctcgtccgcagcttgaccaaccgtctcgaaactggaggcctggtcgtcgccggcctcggaccagccgacctcggcctcttcgtcactcgacgagctgccagcgtcaatgtctgacgatgtgccatccgacaggagagcatccatgacgagcgtgaattccagtgcgtcttggtggcgaagactcggctcggcgagaggcgtgcaggttggaagcgagagcgatgcagagaagacgatgtcgagctcgtcagcaagactgctggcgtcctcgtcctcatcggtcgcatcgagctctgcgtccgagccgctactggaagcggctgcaccggcgagtctaagcaacgagctcgagcttgcggaggcgagaagccggcggcgcttccttggcgggcagggcttcggaagtcggcttgactgtacactgccgaagcttgagtcggccgaggcaggctgagactgcgagagcgacgaatcccagagctggtcgaggcccgcgaggctagacgaggtcgacgtcgacgcagagaggtgacgggtcggcatcagggacgagtcgggggaggagggtaggctggtggccggtcagggacaagcagcgaaggcgttcgagggcggaggagcgacacgcgcgcggccgacacgatcagccacgattcgagttgcttcaggccaaagcacaagggcggacggctctgggcaaagggtcgatcctcatcagtcaggatggctcagaaggatattccaggcaataattgggcctggcacagtctccatcaatcgccagacgcctcccggacgccgcagccgtcgatcggcgcttgctgaacaccggtagacggagcgtcgcagagtccggctctcgggtgcaagtgtacgtagccgatgaaggcgcttctgaggagcggccagtggctgggcgcgtgtcactgcgccgaggtgaagcgctactctaaaagggaaggcgtcgcatgatcagggcgagacctgcagatcaggaactcaggactgggatctcacagagctgcttcggccggtattccggtcggcccgagtagacgcggagctgatgctgaggaaccctctacgggatcataccacgacgtcacgtcgccctcaacctgtcgtcccttcgccgccgtcgccctcccagctgcgttccatctcctcctggctgatgaccataaggctcgcgccgccgtttccgtcgccctcgtcgtccgaaaagccgtcgtcgtcggcctcgaaggcggccgtcaggtcgtccaggggctcgacctcgtcgtccgagtagacgtcgtaagactgcttagggttcctgcggacaggagcgggagaacaagtcagtcgtgaggtcggaaacccagcgggcgagcagtcacgtacatgaaggcccgcatgcgagcagccgcccggattcgctcgagctcgtcttggagccgggcgccagtgacattaccgaggccgaggctggcggcgatacgctgctcctcgcgtagcgtcagcgcctcctgccgggcttgctcgcgcgcgcgttcgcgctcgaacagcgccgactgaagtgcgagggcctcgtccatgccgagcgggtcggtgcggcccgtcttgcgcggcgtcggattgcgactgagtatgagaagggacagtcgtcggtcagcgcgagacgacggggtctgaagaaaggcggtcgcgagggaacgtgtcgcacaagacgggactcgtctgcgtgctcagtcggcggtagctgccgatgccctgctcgggactttgaccgagaccaaagtcgctgttcgtccctggactgatgccgtcgaccgagaggttggcgacgccgtcctgggtcgtgagcaggctcatgcgctcctcgagctgggcctgcatcgcgacgagcttctggcggtgcgggtctggcggcgacgacggccggcggggcgggaagatggaccggtcagagaggacgcgggcgttgcggctgaggttctcgttgagctcctgacaggggtgtgaaggacgacgtctagtcagctgctggctgcctatcgcgctccgagggcggtgggaagggtgacgcacgtcgagagacatctcgtcgatccgcttggtgtcgcgtctcgggccgcggacgaggatcggctgacgctcaatgtagggccgccagccaccctgcctgccaggtgggaggtgagccggccccgccccgacgccagcgaggggtgcaaagctcgaggccggcgacgagagcgtcggtgggggcgccgagctcgcggtcggcgacggcgaccggtcggacgagtgggtcgagcctgccgtcgagggcgcacgcgggcgggcgacgtgcgtcgtactcggtcgaggtaggtgcagcatagcagcagagtatgattgagttaagttgaaggaggcaaggagggctgttgtgatcgtgcggtcgtggtatggtgagcaaggagacgtcgcttcagcgaccgccggaaggagagggcgcgggcagcccggcaagcctgcagcagcagcagcagcagggttgcctttccttctcgattcgctacgccggctggcaaaaggatgcgagctgagctatcgtgcgctctgactagagaagctgaccttacgctgatgccctgtcgagctcctcctgccgtctagcgcttagcccctcctctcggcacgaacgcttcgtgtcgcgcggcgcggcggcgagagagaccaagctcggccggcaccgaacgcgccagtcgagcgcccgacagccatcctctccctcacgacacgatgcccaaggacgacggcctgcccagggagcccaaccggactgtctatgccgcggccggaggcagcaccaacgccgtcgcgagcggcagcaactcgaccggctcctcgaagcgcaaggtggccgcagcagcagctgaagccaaggtactcaagcgcaatcaggtcggtgcacccttcgctgctcgagtctggttgctagcatcgctaatctgacttcgtccatcttgcatgcaggcgtgtctcgcttgtcgcaagcgcaagctgaagtcagctcccttctcttgggcgagctcgcgccctccatctgacgaaccgctttcgcccccctctgtgtgccagatgcgacgcccagcggccgacctgccggacgtgcatccgctcctacaaccacgctcggctacatgccaagcctggcgatcctccgatccctcctccaagttgcacgtacgaattccaggacgacggatcgctgccgctccctccgcagctgccggcctcggctccgcggcccgacctcgaacgagacggatcctcgtcgactgccatcatcgcgcttgagaatcgcgtccgcgaactcgaggccatgctcacccaggcagcggcggtcagcggccttggcgctctcgccgccggtgagaacgacccgcttgtggcgagcaggccggctcccttccccagcatcggcggctgggcgcagcagagcgcgagcgcgacagccggagctactacgcacggcgcctcctatcggcctgagctattcccttcgctcccgggctcgctccgccagtcccgatcggctgtcgcgcaggataacctcgcctgggcggctcacgtcccattccctccggcgcgggcctcgacagcgccggccgcgggtgacctgcgtccgccaacctcagacgctcccgccgatgatggacggtcggccgcgagctggggacctcctctggcccagttcgctcacgcaatgccgaacagctcaatcaagaagtttccagccggaccgccgccttctcaaacgccagtcgttcctccgagcagcctctttggcgtcgtcggcgctagagactacgctctcccgcagtcgtccctcgagccgagcacagcacagggagccttcggcggctcggtttcggagtacatcgcccgcaactaccgtctgccggcctacgtcgacattgacaccgcccctgcgtcacctcttcgtccgccgctgtcgccgccgccgccgccgcttcccccacctgtctcaaaacgtagcgagggcggcgtttacatcggccacgacggctcatcgcctggctgggtcggatttgaacccgtcaggcaggaggcgtcaactggcgagcccgaggtacgcgcgaccgaaccgagcccgccttcggccgacgccttgcaggacctgctttggccgggctatccaccccacctgcctccgccggccatgctcgagcgctgcgtcgagactttcttctcaaaggcaggttttggcaacctctttctgctcatcgtgctgctctgacgactccttactctatcgcagttgacttttgcgtcccacatcctgaaccgatcgaggttcatggcccggttggccctgccgccgctacacgagctctaccctcacccgacggttctgcatgcgatttgcgcgattgcttccttctggcttggcgacatctacctcagctcggcccacaagacggccctctaccatcaggccgagcgaccgaaggccaataagaacgccctctcgtccgaccggcggccctgctgggacggcctcggccagccgccggccaacacgcggcaaggcgttgacgcagactttggccaatgccacttctcctggttctgcgtgcgtcctcgccgtcgagcagttcctgtacgcctccaagctgaccaagttacacgcccttgcagctctacatggaggacgatatcacctcaccgacctgctggaagtcgatcgtcttagcgtccagcatcgccgtccactattgccacctatcggctcgctgggtcgagggctgggcaatcttcgcgccgggcgccaggtgcgccgcccaaagtagatcgccgactttctcgctgaagactgacccttccttttctacgtccaggcttgcgatccccatcacactgcacgcaaaggccggaccatcgagcaagggctggtggaacggcaagccctcgcttctcccggcggccgaggacgcgatcgagcagcaagagcgcgacaacctctggtggttcatgtgcgtcgctctcgacaacgcagctctgacctgctcgctttagcctgacgtcgcttgcttgcgtccctccaggctcatgctcgacaccaatgcctcgacctccagcgcgtggccgggcatgattgacgaccagtcgactacgatccctcttccaggcaactttgcggcaacggaccctgcggtgcgtctcggactgtgtggactgatccggagcgttccatctgacacgcttcttgcctttgtgcctcaacagagcccagatcggcagtcggctcagacgcttcattcgcccgacctcttcgaccgccacccgtctggcacgaccggcttcaccatgctcatcaagtcggtcctgctggtgagtcgtccaggagatccatcctgctctttcaaaagttccgctgacactcttggctctcttgccagctccgcaacgtcaatcgcctcgtacgtctggtcgacgcgacggccatgccaaacgcgcagcagacggccaagttccgagcgatcgacctgctgatctcaaccttccggtacgcggccctgacacttcattaatgctgaacgagacctggctaaaactatcccctctttcgcagcgcttcgttccctgccgacctccgagacccgatccgtggcggcaccgtcgacaacagtctgtttgccgcccattgcacgtcgctcgtcgcctgcatccagctgcatgagcgcttcggcgatccggcggacgacagcaacccgtccaacctgcgcatcctcgcctcggctcgcgctttgctaggcttcgtgcaccgtttgagctcgacgttcgacctgacaaccgtgcgtgcttcaaactgcgagcttgcgctgtcttcttgcagttgctgactcttccgtctccctcagctctacccgttcacgtctttcgctttcttcgccgctgcgaggatcatgatccggtggttacaggccgcgctcgaccgggacgacgtccaacttgcgaatgcccttcgatccgagatcaacgtcttccggttcgtgcatcgctcctggtccgcttccgccgtctgactgatacctaggcccttctgctcgcaggctcgcgctcatgaatatgggaggtgcgtgctcatcgcaggggcctcacgccggtcgacgctctgctgaccctcgacatcgcttcgctctcacagagaagctgccaatcggctcccgtcaaggccgaatgctcgagaagctactggcagacctcgacagccgcaacccgggcgacgagctcggctgctcccacgtcatatacttctttgctcaaccgacgccggccggtccgactcgcggcaccatcagcgagatctcgccagtggcaaccacatcctcgccgtcctcggccgcctttggcaacgcttcgctggcgcccgccgtcccgctcagcccttggcctttgagtctggcgggcgtgctcgaaggcgagctctcgacgctcggagcgccgctcgagtcttggcttctcgacgaagagtcgctcggcttcggcagcaccaccgacggcagccggccgtcgcctggcttgtcttacttctttgcaccggcgacgccatcggatcgggcttgaccgagcgccacgacacccgaaggctctggcatgcctttggtgagaagcgtcgccggtcatccgtcgccggcggcgtcgactccgatggctcgtgcgggcgagggaggagaccctctgctttcgatggcattctccaaaccagcccaggctacgctctggggctcgccgctgccagcgcatggaaaaaagctcaaccggacgctgtcccaaagtagctgacccggacgagggcgcgtcggagcccattttccccctaccccctgcccctgttcggctcttacgcctgaagcgtactaagcgaccgattcgcacgacgtccgcgcctcaaggccgacaggacgtgcacaggatcatgagacatgcgtaccgtcggtactggatgtcttgcgaggcttgaggcggccggcgatggtagttgggaaagagtgaaccgggggtcggctcgacgcgtcaaagtccgcccatgcgccgtgtgcacatcaatccgctacctctaataagctggcgctggtgccctgactcctgcatcctgaagaacgtttcgcaagtccagtgaatcttctctgaggaggcaaaaagtcaccgcttccggaatcgaaccggagacctgaggcgaacaagggtaaacattacaagcctacgctctgccaactgagctaagcggtgtcgatgtttgacagtttgatttgttaattaagttcacaacaatggttcttccttctatgtcggctttccttctgctcgctcccttgttctctctcatttggccggtcgcgaaagggtacgtcgccgccgtccagctgttctctccctattgatggagaagggtggttagagccagggcctcgaagaggctcggagggcgaggttggagtgctcgctgcgcgcctcgagctaagtcgagcagccggcgggtgaactcgccctgcttccctcctcccgtccccacctccctttccagctcttctccatcacgatacctcctcgctctcacctcgggcagcaaaagaagctggaagactccttttgactctccagcaacagccgacttggcgggctctcgcgctggtccgccgcaactcattcgccgcggttgacgagctcaaccgcccgcctcgccgactctccagacgacctcgcctcgctgacggctgaccgccccatctgatcaggccactcaacctcagattggctccgtcgcagcctgctaccccactgactgctgtttgcgcgttaatcgacttgcgccgagccgaggatggtgcttgagcgacgtccagtgggctgacaggcccgtctctccctgcccgccggccagcgcgtcctcgccctcggcccggtcactctcccctcacctcaagtgaatctaaccaaccctctgtctcgtctcgctacagatcatgctcgccttgaggtgagtcgctggtatctcgacttgagaggagatgctcgaccgatccctgtgtctctgtcgtttcgcgggccgggccgggcatagttgttaccgggctcaatatcgtacgctcgaccttgtctctcagcgcgacaagtctaggcttcgctcgacgcggcccgcttacggtcccggctcgccgccgcctcgaccacctcttcctcgaccgccgctgcccatcttcctcccgcccgctcggccgcagttcgtttgagctcccaggcgaatttccctcgcagcactgtacgtccctcctgcagctacaggcaattctccgggacggacccggccctgagccgggcaggcaacgacgacaacgacaacgatatgccgactctctactcctgactgccttcgcccctgccctgtcttaccttctccttgccctccgcccaccaccctgaccttttattcatcaggtccttgcttacgagcgaccagccggacctttttcttcgaacgccagccgctcgctttgcccgtcgccatccacccttgcacctcagacccgcctccgccccagccctcccaccttcccttcacctgcggccgacctggccacatgtcgaccatggtgcccaacctcgtgctcgtcatctacctccacggctttaaaggcgatgagtcgaccttcctcaagtcacccgagcgcatgaaccccatcgttgccgagacgctgccggactgcgtcgtcgagagcgtcgtctcgctcacgagttgcgtcgcccctgcttccgactgagctgtgcagacgtcgctcattgctgaccaacgaacgaaacgactcaacagaccaagggcgagctcaccgcggccgtcacccgcttcgtcgactggctcgcgacgctcaccgtcaagaaggagaccgagcacatgcagatgcacggcggcaaccagcccaaagcccgcatcgtcctttgcggtcactcgtgcgtcttgtccaaagctgcaggaccttcagaagtccgcttactgacccgcctcgtcgctccaggatgggcggcccgctcacggttaacgccttcatctcaatctcagcgcagcactccgaggctaaggcgttcacgtggccgcggatcatccgatggccagccggggggcgggcgctcgagcaggcagcggggagacaagaagcaggctttcgacgttcagcggacagagagatgagatgcagcgcaattcatcgtggcagagggcggcgtttcgctggcgtacgtgcactggcgtacgaacgcaactacaacgcaccaagctgattggctctgtcgctgacccttcagcggctgcgatgactccaatccgaggctagtcgaggtcggggcagataggccacacggacagtcatgcgctagaagggagaaggaggagaggggcaaatcaggagcgcgtcgagcgaccaggctgcagtcggacgggcctgccgagagggcgcacatgcagcggtcagcatcccttcagctgaagggagagcagccgcgacgtaccctcgtgcgaccggccgaccgactgggagtgggaaaacaagggagcgagcagaagagaggagccgacatagaaggaagaacggaccctgcagacacctcagacaggcaggaccagcagatatcgacatcgcttaactcagtcggcagagcgtaagcggatcggcaaggagaagacgacgtacgtgagtggtgccgcttgattgtgagttgaccgctcagtcgccccgagatcgctacttgaccgacgacccaaggggtgttgatggctcgaccgacgctgacggcgcccgtgcatgctgatctccggcgctcggggcgttgcgcaggccgaccgtcaggcgggccaactgccaggtcctgcgaatactagccctctctggaggcagcttcctcatcgcagccagactctaggccaccgctgcaagcccgcttctagaagccggtcctcttgctcgaatttaaatacgatagcacgcgcatcacgtgtactttgacctctcgcgcagtttcgggccatagcggaagaggatgaatggcaggggactgtaggaccgagtcggaggatcagcacagggtcgtagcctcgtcagagccggctagagcgcacgccaggattgtcgtgatggcgcccaggacgcagccggcgccgaccgtgccgagccttgcgtacatctgattcgagaactgagggcgggacggctagtcagcgcaagttcagcttcgctcatgcgcgcccggacgcaccagtgggaagccgctcgagagaatgcagcgcaaaaaggcgttgctcgccattgccgatgccgcgaccgggcgataggtgtcggcgaggaagccaaagacggacgagaagacgaaaacgatgcccctgatggataggcaagtcagcttcgggcacgtcacctcacgcctcgacggggagaaagcactcacacgccaaaggggatcgtacagatgattggggcgatccaatggacgcgggcgatagaggttgcagcgaagaggtagagactgagaggcacgaggatggctccagccatgccggagcgaagacgagcttcaggaggtgccttgccaccgtgggcggcagcgtcccgagcatagagcctgaagagagcggcgcgggtaagcaacgagaacacagcaacacgcaagcaggcggacgtactttgcccagagcggctggtggcagccggcggcaacgatgccgacaccgaggccgagaaaagcaagaccagagcactgctggttgaagccgtggatctctgcaaggggaggtgatgtcagcgattgtctgtccagcattagcgttgcagcagctggcacgcacggcggaagacgataggaatggcgttgaactgcatcgagaggaggcggcgacatcagcaggcgtcccgtttgacagatccggtctgcgcagggacgtacgtcgagatagaggatcgcgaggaggacagcggtccaggtgtccagcgcgagcaccatcggctcgtctcgcaacagcttgaacggcgtgaggacgctcttcttgagcgttggccccatctttggcgggttgtgctcgctccgcgtcatccaccgctcgtcgcccgtctcgcgcctcttggcagcggccttcatcttgaggacggtcggaacgtgcgtctcgggcgcaaggaggaagagggccagcgtttggcaggcggcccagatgatgacgacgtagtaagtccagcgccagctcgtgtgctaaaaatccgggggggtaggcgtcgtcagcgatgatcagatcagcgtaacagagaatctgccgcggcgaagacgtacctggttgataaagcctgccgaaacgggtccgagaaccgggccgaggaagggggagagcctatgtgcagatccaagggttagccggagcggccgagagcgtcgtcgaagccgccgagacgtacgagtagagctgcatgggggcgccgattgtcgatggcgggaacatgtccgagatggttcctccggcgaccgagaggaaagcactgccggcaaaggcagagaaaaagctagaaagcgagagcagtgtgatcagccgaagcggcggctgtccgtcgttcggagcgaggcacgcaccggaagacgagatgcaggggatacgaatttgcgaaggcgaccgggaagtggagcagcgtgaaagcgctcaggctgacgtagtagacctttgaccggccaaagaactccgacataggcgccaggaggagcgggccgaagcttcaaggagtggccgacaagtcagtatgggcacgggtatcgctgcgtctcgagagaggacgcacgctagacccaggacgtagagcgaaacgttgagactgcggaccaagcgtggcgagaaagggtcagccggcgtgcgagacgacctgcagcagcaggcatggcaggcgggcggggagctcggaacccacatcgcgacctcctggctgatgccaaactcctcgcgcaagcccgcataggtcgaggcacccatcgagctcgcacaagtcctgtaggaaccgcgcaggacagcaggctttaggtcagcaagggcggggtggaggtgctgaaggggcggcgacgcacgcgcagagcgacgcgctcgagacgatgatgaccatcgcccatctcctccagagcgggaggttgaacggatggtacggatcgtctggcccttcaaactcgacaaggaacgcgtcgtccgccttgccgtctgtcgtcgaggccggcggcgatgggcccacgagctgcttctcggggtccgccgacgctgcatgcgctgcggccggcttcgactctgagcccgagccagactgaagcggcgagccgacgatcgtctcggcgctgggcatcgtcaggctcgacgtggccgatcggaggcgagcaggcggtgctgcaggttcgggtaggggagccgtcgacgctgctgggaccgagctggtcatcggggagaccgtcgtcgtcggagggaggaaggtcgaaagactccgcgagaggagcttgaagaggagcccggaacgtcaggaagaggggcagctcgcgtcgtcggcctggaactggaaggaaagagaggcgcaggagagggtgatggtcgaacgagagaggcggcgtgctcagcaggaaagctgtccgaggtcggagcggttcgcacggcgggcgagcgacggccgccccggccgggccagacgtaaatcagtcagctgctacgtcggcggagcgacggagccggcatcttcgctggtcgcccgtcccgcgtcctaatgctgccgaccacctgtcccgctcagcccagagcagctgggacgcatgagagaagagagccccaagagctgggctggtctcgtcatcctttgcattggacgattcatcgttcctcgcagaggcaagagcctgcccggcggcggcgtcgccccttgccgacggcgggcgagctgcgcgcgccaacactcgtccgccgacgcgttgagcctgtcgtccgacacaaccgggccaacgtgagaaccgccggcatcgtcgcccgccgaccggagcgttcgtagctagggtgggcgagatggtccgcggccgtatggctgcggaagtcttgaggacggggccttggcgagggcgctgtcggtcgggcggctcgttcgtccagagtcgaacaggagggtcgcgcctggggacgacggcgtggttcgtcgtcgatgtcgcgctcgtcgacaagcgacggtccctcatctccaggcgaaggtggcaggccgccagccgcaaggcgaagtggcagatctaccggacgtcgagcgacggcttcctcagagcgagtcgagaaagtcgtcgaccgagtcggcctccaacgtctgcttgcttgccgccggcgtcgtctgcgcactcggtccgcgacgggcataagccagacgggcggccctgtccggcttctggggcgcctcgttgaagcggctgccgaggaggcgggccttgacgtctgcaagcgcagcgcaagtgagtatacaggagcgtcaatagctggcgaacgaacgaggaaaaaggaagggcgatcataccggcaactgcatcagccttgtccttctcgagcttcattcgctccatggcgtcggtgtcgatccctccatcctcgtcgcggacgctcggccgcggcggcgccggacgccggatgcctccccctgcgcgcttgccggcgccgagcttggtagccgacaggcgggcgagcaaggcatggtcgacgtcctcgtcgtcctcgtcggctgatgagccgcgctcatcatccgacggtcgggcaggcttagcccgatgctgctcgaggatcgcccgcgcatcggcctcgcctggaaacgggtcaagagcggccgtcagcggcatcgaaccgcttcgcaagcaacatcagacgcgcagaccaacgctcttcatccgaggtcggctcgaccggtccctcctcgtacgaatccggctctggctcggcgtatcggtcggcgttgctcgtgagcttccgacgcgcaaacttggggtcgaccggtgcctggcccgggccaggaccgcgagcgaccggcggcttcactgcgaggagcaagaccagatgagagtaggatcctggttacttactctgctcgtctgatgcagtagaagaaacttactgtgcgacattggcccgcctgctggaggcaggtctgggaactcctcctcctctgcgccggcctcgtcatccttgtcatcgtcctcctcgccgctgcctgatccgctcttgctgccatcggccgcctcctgaccctgcgacgcggcgccaggccgtccagcacctcccgagcggtcttcctgcttcttaattggattgccgcgcgctctgggaggagaagagggaagcgacccgaccgtcagtctggcctgcctcagccgaaggcacgagccagagcgacgcgtgccgccggcggaccgggcgactctgcaggaagccgacgcacttattccaacgcttggacgccacttgcttgtgcttattctggaggaccatgcctgcgtgtctgctactcgagcgaaggaaagggagtgaggggcctgtcgtcgttggatgcctgcggggaggcgcgagcttcggcgcgtctcctgccgcccggtcggagggtcgtcagttgactcctgtcgtcgactttcgaagctccctctccacggcctctcgacaggtaagctccctttaagctggacaaccttttccagaccgatctcaagcgacccacaagacgctcatttaccgtccgtcttcccctgctcgagcagctgacgccccctctgctccctccgaccgccctccgagccgagcctagtcgcacaggcagccgcctacctcgctcagccgctagcagaccagcagggccgtcagctcgtctcgtgtacgcatcctggccctcctcatctcagccaatccgccttgctgcctcgcaggagactgacctccgtcgtaccgcgcagcagctcgtcgtccgcctcaaagctcgtccgcacgagcctgctcaaccagcctcggaccccgtcggttcgtttcgcccctcttgcgcattgggcttccgatcgactactgatcgtatcctcctccgggtgctcaaggacaagaaagcctgtctcatggttcagcggcagtcgaactcgagcagccgctcgatgggcgtctcggcccgcgggcgcaagatgatcaaggtcggtcgttgctcctgtacgaccggtcgctcctcgagagcgatactgctgactttctcttcatacgacgctgcaggatatgcacgacctctttgcgacgctcgtcgtctctctcgacctgcgcgaccaccgccaattcttcaagagctactcgttctccttcacgacgtgcatccaagctactctccgctgattgaagctttgagactctgacgaagatccttccccgtcgcagggacgaagcctgcctaaacctgtcggccctcaagtttgctcagtcgaatcggacgcccgaccctaagaacccgcggcgagtcgcggtcacgacgacgacaacgactttcctgatgggccgcgagagcgcaaaggcgacgtgccaggagtttctcgacgctcggctcatcacaaacgcggccgagccggcgggcacagagttccgcgagcgcggcatctggcgttgcacgcccaaaggtctcgccgtgtgagtctgccctcaccatcatcaccgtatcgctccctgctgaccttgagctggggctctctcggcaggctcgagcgctttatcaagatcaacggcatctcgggcccagagctgatgcggctgctaggcgcgactgagaaccaggaccggccgccgctggtctacctgcaacgtcatccggagaccgaccgtctgcacctctcccagcaaactgtcgccgtcctctggaagcactttgctggcagccggccgaacttcatcgctcctgccggtgcgccggccccgacaggcggtgacgactcggccggaggctcgacgccttttcaaccgtcaaacaactcgtccaccggggccctcgtcaagcgggcgtccagcaccatcgcgcgctcgagcatctcgctcggcattgaaggccagcacgccgtccagactcctaagggcatcgccctccgcaagtttgccgtccgggctaaggcggtcggtggtggacctgcggtcgagcagatttttgaccactgcatgccttccctcgctgtgctcgactggctgctcgaacacacgaacgtctcccttcggatcgaggcagccgaggtcgctgcgcagtttgtccggtggggcttcatcgccctcgcccaggacaagagccgtggctcgcgcgacaacacgctcgtgaccatcttttccgacacggacgagacgggcaagccggtgagtccggcatcgacctcagcctgaacagccgattgacgctgtcgtctcttggacaggtcgaaggcgagtaccgcggtaccgagcgggctgtctaccgggtaacggacgatggcgcacgcgctgctggctggcacctcctggatgatgacgacgccagcggcgacttcaacccttttctctcaacgagctcggccggccgcagtggcgcccgtcgtcactctaacagccacaacgcccgcgacgtctctgaggtcgaccagtttgccgattctgagccaacggcgaccgccccaaaggagactggcgggctcaggctccagcacattctctctgacccaggtctccggaccctattcgaggactttctccggagccgcttctgcgccgaaaatctggccttcgtgctcgaggtccaggagttccgcaagcgattcgcgacgagctcgagcgcggccgctgcaccggcttcgcgctacgtcaaggagcgcggcggtgagatggactaccacacgcaggagctgatcgagcgcgcgttctggatgtacgtctcgcctgcgtcttcctttgacgacgtacgaggatgctgatatgactctctcttcgctccagctacaaccggtacctcgccccgctctcgccctcggagctcaacgtcgaccactcagcgcggcttgacgtcacgtcctatgtgcagacgcacctcgcgagcgcggccgccctcgccaagcgccggcacgaaaagcggctgcctttccagggcgggccgaccatgacggccggtcagctccagacgatgctcgtcctctttgagcgcgtccaggcccacacgtaccggctgatgtcaaccgactcggtgcccaaggcgcgtcgtcgctcgagactctggcacgcctgtcgctcaccctgctctcttcctcctcgctatcagtttgccaagacggctgcttacatcagttacggccgcagccgccagacatcgtcgtcaacgaccgacaacgactgatgggtcgtcccgcttccgttggcccgctcgttgctctgagcctgacggacgctcgccctgctgtttatgggtgcgacaactcgccggcgcgcagcttctttgacgaccccgatacccgaccctccctttccacgacctcgtacggccctcactcttacgcctctcacgacgcaccctctaaacctgtatccccgactcttgtccgatgttcctgtcctctttcgtttgaccgcagaccgcttgcgccgatgtctcgtcctctcgcgccgtcgtccccgggttgcttccggtaccgagacgatcgacaagggccggggccccgccatgcagcccgaggagagacagcgacgtcggataggcgactagttgccttcgagcgccgccgacgacgagagcaagcagtgaggccagaagtaacagcagcaggccgacgacttggcacgacgactcgcttcctgcaaaccctcgcctttgcccctgtccgaccggctgtcaaggcctccctttaacccctcctgatcgcccttgcaaccgacgctagctcgcctttcgccctgcccctgctccggcccgcaaacctcgcacaagcagaccccaccgctatccttcggcctgcccgacccgcctctctgaggcagctcacccgaggctgccctctccgaccagcagtctagccgtcgtctcgctcgccaggccgacaacaacccctctccgcctgcctgtcgctcgtgcgcacctctcgatcggagctccgctcgtcggctccgctcgtgccttacggtctcccgcccctcccgcggcgcgcacctcaaggcctgcgagcgcctaaatgttcgacgatgctccgaggagagacgtccttgatcgcgacgagctcggcagcaccagcgtctttgacccgaccttcacgctcgcccaacgcatctcgcgcggctcgcttggagggcgcagcggcaccaagagctcgagcgggacgggcggcacgaacgaggacctcatgctcgagcggcggttcggcctgcgcaacgagcaggtgcgcgagtttgggacgctcgagacgttctcgtttgcgatgtcgatcatcgccgtctcgtcttgcgtcgcaagcagtgagtctggggtcggcaccctttttggaagcacgcagctcgagctgaaccgggcgtctttgcgtccgccggccagcgctcgacacgccgctcctcctcggcggcccagcctctgtcgtctggtgctgggccctcggcgcggtgatgaacatgtcggtctggaaactggaggccgtctgcttgcatcaaccgtggagactgacgaaccccttccccgttccaggtcgatagcggtctcgatcgccgagctcatctcgtcctacccgacgtcgggcggcctcttccacgcgtcggcctacctgtgcccgaaacgctatcgagcgctcaccgggtgggtcgtcggctacatgaacaccatcggtcaggtcgccggggtcgcgtcaaccgagtacgcgctgtcgtcgatgatctgggcgggcgtccgtgagtcgcctttgtccagcgcctgacatcgtcagttccgatctgatcggcttttgcgatcgaaaggcatggccaaggacggcgactttgtcgtctcggccggccaacagttcgcgttgtacgggggcctactcgtcacacacggctgcctcaattcgatgcggacgagccagctcgctgccctcacccgcggctttgtctttgtcaacgtcgccgtcaccctcatggtgccgctcctcgtcttgtttctcacgccgctgtcggaaatgaactcgccaaagtgggtttttaccgaggtcaataaccgtacgccgcatccctcgtcctctcgcgctcgtctgtggcaggccactgacgtccttcgctcgcgaggttagagaccaactaccccgacagcctggcgtttctcctcggcctgctctcggtcatgtggtgcgagaccgactacggtgcggtcccagcgcggcacctagctcagatgcgcgaagctgccgctgaccgacgccttcaacaccgcagacgccgtcgcgcacatctcgtacgaagtgaagcaggctgcaatgaccgcaccagccgctttgacagtcgctgtcgcgacgaccggcgtcttaggctttgtcgtgcgtagacggcgcgtgtgacgggagctctctgacagagagtgctgacacagcctttctcgcccctcagctcaacgtcgcgctcatgttcgctgctcctccgctcgagatactacctggtattagcggcctgtccttcctggaggtgcgccctaagagcccctgaagtttttctctggctttgactgacgactccccctgctcctctcagatccttcactcgaggatcggcaaggcgggttccctgatcatttggatcctcgtctgtctcaccgcctttttctgcgtccacgtcgccctgcacgccaattcgcgctcagtctttgccttctcgcgcgatcgagctctgccggatcgcggctactgcggtcggctctcgcccgtcacaaagacgccgctctatgccgtctggatcctcatcttcctctgtctcctcctcggcgccctctctttcgtatcgacgcaagctgtgacggccgtatttagcatggtgaggcgacaaatgttgcgctccgactcgtgctcctctggctgaccggtgatgcggcattccagtgtgcggtcgcccttgatctctcgtacctggtccctgtcgttctccgccgattgtttgccgatgtgggtcgacctcagcgtctccagtcttttgcttaggcgctgacgcagaccggcctttttacctgcagcacgaggacgtcatgtatcggccaggcccttttcatcttggagagccttggagcgcaatcgtcaacgcgatcatggtcgtctggacgttatttgcctgcatcatcctctgcttcccaacggtttaccccatctccgcccgctcgttcaattgggcctgggtgatgacgctcggcgtcatgctgctcgccgtcacctggttctttttgcgaggccacaagacgtaccacggcccgcaacgcgacatcccgaccccattgccgcttgaccgagatcctatgaccgaggctgttgcttgccggcaaggccaggtctcggtcctaagctactcgcaaaccggcgggaccggctcgagaaatcgcttctcgacccgcaactcgctcgcgtacggcggcgacccgccgctcatcaccatcatccccggcagcgaggcctccgagtcgccgagaggctccgtcgcacccatctcgcctcggcccgacggcgagcgcgactcgcccttagagatgacgccgatgtcgccgaccggcttttcgtcgtgaacctgtccattcgctcttgtaactgctcgcatccattgctttgtcctccccaacgcgtctgtacaaattctctcattgtatcgtctcgtcttctagattgatttctcttaatcgctgctacgattcgaagtgcctcgtcgagtacgctttcggccgtcgctcgaccgggccggatgcagcccgcgcgagaccgacctcggtcatcagccaaccccgtcctgcttgcaacgcccatccccttctcgcacgctcgaccccatccccttacttgctcgatggcggacgctgtacacctgtcgccctcggcgtacgaggatgccttcatcgtgagtcggaccagcgtccgacggcgaaggatgcggtcgcgatggcgagacggcctgaactgaacccctcgtcacccctcggcctttcccttcgcgaaccctgccatccgtgtcgcccagaacacaacgaacccgaagcagacgcatgccctccttcaaggccgcctctcggccgcagccaagctgaatgaccagctcgccgacatgtacaaggagcgcgcccagatcgaggcgtcgtacgtcagcgccctccagaagctccagtcaaagcggggcggcggcggcggcgtcgcccgcgacacgctcggcgccttctcgtcggtttgggaggccatctggggtgaggtgcaggaggtaagcagcctagcttgagcttgtcacagggctggatgcggcctccgctggaggcgaggtgccccggagcagcacgagctgaccagctcgccgcctgtctcgatctgtcccgccggatcaggccgtccaggtgcactcgagcctcgagcgcaagatgaaggacgaggtcgagacgcctctccggagcatggccgtcaagggtgactggggcaagcagggcgctgtacgtaccgaccggtccccgccagagctggctgcttccgtctaaacgagacctcttcctccctgtcagtatgacggcaacatcgagcgcacgatcaagcacctcgactcgtgtcagacaaggcttgccaaggtatgtagaggaaggcgtccgacttcgtacaagctcagatgctgatgttgctgcctcttccatcctgcgcatcatcactcgcccgacaggcccagaagaaggcttcctcgtcgagcaaggacaaggttattgccgaggtcaacgcggcgtcggaagagctcaacgacgctcagcagggctggttgatcgagtcgcctcaagtctttggcctctatcaggccatcgacaccaaccggctgacggcgctgaaggagatcttcaccaagtgggagacgacccggagcgacattgcgcgcggcgagatggaggcgagcgaacgcatcatgatgatggtcctcggctgggacacgctcgaagatctccaggacttcctcgtcaagaagggctccgccggcggtgtcggggcttcggagcggacgccgggcagccggatggtcagcggcgcgagcaacgtcagccgaaacacgagtgcgatcgcaaacgctctgtcatttcatcaggccgagaagctgacaccttgtaatctaatccctctccgccagctgcctcggtcgtccgccggccgtcggtcagtgcgacgccacctcggccacgggcgagtcagaacaactcgtccaacgacttctcgcctgcgccggcccaaggcacgcccagcggaggcacgagcaacggcctgtcttcgctcaacccgctcaagtcggtctttggccgcaatcgcgcccgggcatcgtccaacgcgagctcgaaccggtcgggcaatggtccgcgccctggtcctggccacaccgacagcttcaccagcagtggcggaggtggcgctggctttggtatgctcggagatgacgacgatgagccgacgacgcggagggacgtcgccagcagagagggcactgaggtcctgacgcccgtgcgagagagtaacgggcagtcttcggtgcgtgcccgtctgcctgatcctggccgcccaaactatcgtgctgaatacttgttcggccatcaacccgacgtagaaccagcccgctgttgacgctgagggctactctgtcccacctccggaccacgacaagaagccctgggagacgaccgacttgatggacgacgacaccgacatgcacacgacgccgctcggcgaacccggcgtcggccagtcgtcgctcaagatggcgatcgcccccgagccgatccacgagagcgaggaggagcagcgtttggcgctcgagaagatgaagtcaacgctcgctgcgcctggcgcgggtccccagcggcggggcacggttgctaggtgcgttcgacctgcctggttacccggcctcgagccttcgcatcgacgagtctgaccttacttcttgcaggggccggcgcgacgtgcgcaacacgatgatgatcaacgacattccggacgaccaaccgctcggcctctttgttggcggacggtcaggtggcagcctctcggcttcgcgtggcacgagccgggccggctcgatgcagcaggtggactcgccgacggccatcacgccgacgagtggcctgccgccgctgccgctgatccctgcgacgaaccgcgcgagcagtatgctctcgagcatctcgtcgcaccagcgcacggtcggcaacgcgtccgccggaggcgcctcggtcactggctcgcagcagggcttccggtcgtccatcaccgagacgtgcaacgtcgtctcgcgcgcgggcacgatcgtccgcgcgatggtgaccggccaggtcgaggcaacgttccgcgacgtcggtcaggccgagctcgcgcgcaacggtaagacgatcaagctccggatcgagcgcttcgagcagctcgagaaggttgcgccgaacccgcagtttgtcaaagctctggccgacggccagccgggagagtacgcggttgatgccgaggccctcgctggcgcggcggccgccaacccggatcggccggtcgttctcttcaagtaccagctgcacattcaggagggtaaggccgaccgcctcgtcccgttgacggtcacgccgcagtggaagtgcgacccgaccgacaccaagctgctcattgcctacggcgcgagcgccgagtcgcacatcctcgctggtgctggcgccgagcgctcgccgtttgatgagccttcgtcggcggcccagatcgacgaaatttcgttcactgtgcccatctcgtccgccaacgtcagcaacccgcagagcaagcccttcccgggcgaatacgacccggtcgccaagcgcatcgtctaccgggccgagccgctgacggccgaaacgccgatcggcaaggttgccgcaaggctcgccgttgacgagccgactgtcccccagccgatcgccgtccgctggatcgtccgcggcgtgctctgctccaacctcgacctcagcgtcctgccctcgtcggccgaggacggccaggagggcgcgtttgacgagtttggcgccgaggtcgcggccggcggcggagcgtggcggctcgagggcgtcgcccgtaactgccagagcggcaagttcctcgttgattagaagaggggcaggcaggggcagtcgctatcttgtttcggtgatcttttgtatgtgactttccagaagaggccgccatcgtgggcgggtcggaccgagcgatcactcctgcccgtcagaactgcagcaatagaaaccgcttcccgcaacagcaataaagaagcaggtagggccctttccacgtgatcttgatggaaccgaggatggtctgctcccgtctcggtcgactctccgctctgtcggctccagctcacgcctccccgcagctgccgcgccgaggaggacaggcactctcgacgtgccatctggcgtcgtcacagcatgtttgtgctgctactcgacagtcagtatcctctcgtgcagacggtggagaaagggctgctaggcgttgtgcgatggccgcagcgaggaaaagggaggcccgcaacaggtcgagacggacagcgacagccgtgggcccggtcgttcttcgtgggcgtcggccgccctcgtccgccgggagtcgaccgtcttgctcgctcgataggtaagagagcaccgacgaaggccagctcggaccttacctcctctcaccgccctcttcttctctctcccggacgggctatggtcgacgctccgccttcgtagcgcccagacccgaaacacctttcccttgctctcgcatcaacgctccgagacgccggcccacgcccgcagcgcgtgcccattgcacctccctcggtcgctcctcgccagccccgtcggcttcaacagatcgctcgcagcccaatcgctcggtcgaccctagctcaacgacctccagctttccttacaaccgcccgggtctcgtccttgatcgggacgccagcgccggcctccgctagcagaaagggtcgagcttcgcccttgtccgaagcccgcaccacagctctcccttcgccccgggtcgagcgtccttctctctctcgcatctcacctcgccgccggcttcgaccctcagcctcgtccatcgcacatcccgtctccccttcgcggcaggatccaaaggctcgcagcagcgcttgcgctgaagacagcgtcggtccagccatgcatctgtcggagctcgggcagcactcgcctgcgccattgccgccaggagggtcggctttcccctcgcatcctcacctgctcgaccagcagctgccgccacagcagcactcgccggcctacgcctaccaccatcagttgctcgtcacccagcagcggccggtcagcccgccctcgccctttgcgttcgcaccgccgcccatcggcgacggccgcggaggtgccggcgagagcagcagcagcagtggggcccatcttcagtcgcaccacctcgagctgctgccgggaccggacgacgccggcgttgccgacggctacagagacgatcgctcgcccgacgagaatgatgacggcgccggctttcacccgcaggcaggctatcacgcctcgcttgtcacgccgcacgactctgatcggtcgccctcggccgccgacgacgtcgacgaccgctcgggccgtaggcggcggcgacgggcagggtccgacgcctcgtctggctcctcctcgaacgatggcgagggctcgccctcgtcctcgcgctccggccaatcgaccggcgatggagatggtgacggaggaggtccctcgaggactagcggcgagggcgccggctcgcgttcgacggcgagtggtagcaagccggcaagcggtcgcaggcagcgaccgccacggacgtcgacgacccaggccaggccacaggtcaaggtggcgccgggtccaaaggagaacttgacgagcatcgctgctatccggagctacccgaccggcgaagatgacgaccggccgttccagtgtgacctgtgcccgcagaactttgtgcgtcccggtcctgtccggctttggatgacgcagctgtccctgaggcgagagactttgcggtcgaacgatcaaccaagaccgattgctgacccgccctcttgccttgtccagaaccgcaaccacgacctcaagcggcatcgcaagattcacatggagctcaagccgtttagctgcctaaagtgcaacaagcacttctctcgcaaggacgctcttcgcaggcattggctcgtcaagggctgcaaaggcggcgaggtcgccggcgccggcattcgtgcgtcgtttcggctggcgagctcttccccattcggttcaggcgtgcttaccaactactttctcctgctccgcactagcgtctaatccagcgttctacgagacgcgacccagtacctcaaccatcgctgccaacgctgcactttcgggctcgtccaagtcgtcctcgctgcctccgacaacaatggcagacgacgcggcggccaagcccgctccacccaaaccaaagcggatgagctcgagccgagtcgtctctggtagtactggcggaggtacggcgagcgcggcgagcagcaccggatccaggaagcatggcggcggcagcagcggcgctggcaagggcaaaagcggcccgcgcaagagcaagtcgtttggaggtcgcgagcgatcacgtcagcaagacgaagacgacgggagtgggctcgagggcgaggtgagctcactggtggtggcgtccgcatcagcagctgatactgacctcaatatgtccgacctctcagctcgataaagatccagacacgtccggagctggaccctcgtcgtactctggatcgtcggccgggcccttcacgctgcctttgcctcagtccttcgccggtagcgggccctcactttcgccgccgcacctgcaatctcttcaaatcccgcatggcaccagctcgagtggcggcctttcgccccacctgcagcgccagcagcagagtgtgcgcgatctgtcgccgtcgggcttaccggcatttgtgccctcgccgactagcaacggtcagtacggcggcgggctcaacctctatctccatcaccaacagcttcagcagcaacagcagcactcgggccaatatcagcaattccagctaccattcccgtcgcatctcaccgcccataacgcagcgccgtacgccccgagctcgattgagccccactcggcgcagatggttgacggccacaaccagcaagccttgctgaacggagccggcctgccgacctctgcgcccggcccttacggagcggcctccttctcgggcacggtcgactacccgcgagcaggcttttttccaccggcgccgctgctcggagtccaacagcaggtggggtcgcgtcagtcgtaccggaccccggatgacatcgacgcctggcgcctcggcggcggcggtaataatggcaacggcggtaccgatagcagcggggccttcccctcgtcgtcttcgttcagcggaggtctgacggcaacggtgcccgacagctcaacggcgctgcccctgccgtcgcctagcgacacgcagccctcgcacctctacacgccctatcggaaccagctgtcgcagagccatcaacagcagacgcagtcatcgccgtcctcgctccagccgtcgcccgctggcggccggccactctctcccagccaacttcacccgcatcatcagcaactgcagcaggcgctcgcgaatcatgccgcactggacggcggtgggttctacccaagcctgcttcagcagcagcagatccatcagcagcagcagcagcagctgaacttgcagcagcagcaacgctggtttcaagcaggcggccgcaacagcctcgctcccccgggctccggccaagaaagcccgggctccttcgaccacgaccaggctcgcttctgaggccgccccgtctgaacattgccccttgtcctgttcctttccgagtgtaccaccatctctgccgtctggccagcctcccttttgtaaagcccccgtcggtgaggcgcgtcccgttccgttccttctgcgcaccttgccgttccatctgctcgctcgctcgcccgttcgccctctttccagcagcatacatgtctgcctcgctgttctgtactaaaagaagccgcatttttgaaagctagcagacacggatggaggcaaggaccggatcgtggtcacttgcctggtcttgggtggtcccccaggtgtggaggtgcagagtctcgtactgcgccgctttagcgagggccttcgttgtgaacgcgtgatcgatggcttgacaattctgatcgaaaaggtacgtgtagcgctcctcaggcttctcggattcgagctgcgtcatgtagcgctcgagggtcttgatcggctgagcctcgtcgacctcgttgaggtcaccgagcaggacgacctatcggaaggagaagaactacgaatcagcgtgtagagggaaaagaggggtagcgactgaacgcacgtgtgccttcgggtcggccttcacgagcgaatcgacaaactggccgacgagctccgcctgcgagatgcgagcacggacggcgccattctcgggaggctggaatcgaccaagtgcgacaccggagccactcttgcttgcaaaatgcgcgacgatgacgtgcaggcgcttgcgcggtccggtcgcgcccttaacgaggaacgaggcggctagaggcttgcgagagttgtcccaggccgcgttggtggggtcgataaggcctgaatgagaggcggctggtcagcgagtcggacgaaagagtgcagaatgaaggagcacgacgcaccagggttgaggccgaacgtcgcctcgccggtggtcgggtcctggataatcgactgggactgggtgttggttccgcgcgccgagagagggtcaagctcgagccggtccgcgcggtagagcatcgctgataagagcagaaagagcgtaagtggtcagcgtcgagaggcgttgatgtaggagattctcagtgaaaccgtaccgggcctgatgttgccgccaggcgcgccaccgtcctgcaggtcgatcggcgcgatttctagcgggctgtaagtgacgcccgatacggccttgatggcgtcaatgagcatctggagggtcttcagcccgctcgtaacgccgtcgtctggcgagccacgagaaaattgatcagcgtctgcagcctttaaagaggtaggcacagaggggacgcactcgtcgcgccagtgtcgtcctggatctcctcgaggccgacgacgtcgggcgagcccatgaagttggcgatgtggtcggcgagctttgagaactgcaacgccctcgaccggggcgacaggttgaggacattgtagttgccgagggagaccgtgcactggccgtcgcctttaatggagctcggcgggtacgagccgaccggctgcgacttgatcaccggcgccgtgagcgggaagaggaccggagcaccctgtaaacagcaagagagcgagtcagcacggagcgacgagagacgggcgagagcaagtacttacaaaagcgtagctgacgacaccagtgacgtcctcccatttggtgccgatgacggccgtcttgggggctgacgtgccgtcaaggggcttcccgacgcggatggcctcggggttcgcgtcccagccgccagggtagacgttgattgtcaggccgccgcgagagttcgagtgggtcgcgtagctgtcgccgaccatccagatctcgccgaagttggtcgtccggctgaccgcacgcggcgaggggatccggacgagcatgccctcaagcgactcccagaagtcgaggccgcggtccttgggcttgagcttcttgtcgatgacctcgatatcgaccgtcgtgtcgagcgagaactggtccttcgaccacactgtcgacccaggcggcgtccggtcgacgccgaggacgacgggcgcgatgacgttccccgtcgagaggacggtgacattggtcgggaacgtgagctcggtcaggtgcaggtgcgtatcgtccgaggcgtactcgtcgaccgtgcccgagaccgtgacgaggtcacccgtttggacgaggccgaccgagtcggacccaaagacctggggaaggaagcaagtcggtcagccttggtgcaagccggctgcgacgagagagtggacgcacatataggccctcgctcgtcgagtcaatcttgtcgaccttggcgggctcagtctgaatgtagaagccggcagaacttttggccgtgacgacgccctggacctggacgacctggccgtcgtaatccgagagatagcctgagccctggacgtcgcgcggcagcagcggctggccggccgaagcttgctgaggcggcgcacgtcgctcgacctggtcggcgagcgtgtcgaggcgccgagggagagcggtcgcgggcttgaggagaaggagcagggaaagaagccctgaggtagttgaggtggcgatcatggctgcagttgctgcggctgagggaaggagggagcagctgaggggccgacgagagagacggtcagcctgctcttataaggtagcgagcgagcagcacgcacgctccatggtctcggccgagctcgccctggccggtctccttggctggctttggcgggcagcacagcgatggctcaacgtgggcgtcggtcgggcgcggcgaacgcggacgaggccgatgtgcaggccgcggcacctttaaatctctagctcgacaaacggtcgcgtctccctgctcgacgagcccgacgccctcggtcgaccaggagaggggctgagcaggtggtcgtctctcacgtgcgtcggcagcagccctctctaccacgtcgaagaggtaaggggcaaggggcattcatatcgtgatgccgagggcggcgatctctgaccggaacatggtcacacgctcgagcgcatagagctgccaagacagtcggggcgggcgagttttgcggcgtccgaggaggcaggagagggaggcgggtcagcctccagaacgaagcgagcggcagcagatacgcagacacgtacgagatactcccagtcgggcgtccagtcggcgtccctccgctcgagcgcctcaatctgcgactcggcgctgatgacaccccaaagggcccagctcgcgctcccggccggccgccagacctcgacgccccggtcgagctcggcgagctcgtcggcccgcgccggccggcccttgctcgtctcgaggtaggctcggtagaagttgtgccggtccgactcggaggggtagctcgcgtgctcgctcatcgagtaggatcgcgtcgagtggtggtagtcggcctgccactcggaaaagtggttggcgatgtcgtacgggtacgggttcggcgaagcgtactcaaagtcgacgacgatgatcgagtggtgcttcggcgccggtggcggtggcgggttgttgagcaggagcaggttgccgtactgggcgtcgttgtctgaagggggcgaggaggggtcagtcgctcgcaaggagagacgagggagcgaaggacgagctcacggcagaagaccatccgccaggccttgccagcctcgtcctcgacttgaccccgctcgtattgcctcagccacgaggtgtaggcctcaatctcgcgctcgagccgggcaaggtcaaacgtctgtacccagccggcaagcaagccgccgagcgctccctcggcctcgagccgctcgagccggccgtacatccgccgagcggggcccaaccactcctttatgctctggaggacggtcggctcgcggccggtcgcgccgctctcgagcgggtcgagcacgtcgaggtcgaccgagtgcagctcggccatccgcttgccgatcgaccgcgacgtctccgggtcgcgcaggtcgtttgccgtcaacgcacgtgacggaaagtactcctcgagccggccgttcgtgaaggtgccgtggatcttagggccgagggcgtagcgagatgagagcaggtgaaggatgcggagctcagacggccgcgaaatgaatgtcgtcgaggcatctccgtagacacgcaggagctgaaagagggcgctggagtcaggcacttctaacacacgagcgtccgctgcgggcgggacggaccatggtcggcgcttctgacgtcggcgtcgtctggctcgacacaaacgagacaaagaagacggcgttggtcatggcgcccgagaccttggtgatcttgatgttctggtctgtcagtgacgattgcgaccagtgggacaggttgagccgctggaagagggcgaggatcgaggttgagaaagttgccgaggggtaggtcctggcggcacaagcgaacgcgtcagtctcggcggccagggaggcaatccaatcagcagcccgacacactgcggatccaacgacgactccgagtgctgaacacccttgacgcggacagtatcgtcaaaggcgatgacgtcctcttcggcctcctcatcgagctggaggagcgagacctggtccagcgagcgtcgatggacggccgccgggcggatcagcggcgacgtcggcgacgagtgcgaggctgcccgaccggggctgatcgaggggaacgccggcgagagcagcgggctcttctggaagaccggttcgcatgcaaagggcgacgatagggcagcggcagcggcaagcgaggcggtcgggtcgacggaagcggacagaaggggaggaggtcgtgcgacagcgaagcggcggcggacgcggcaggggagcagaccggcgtcagaacgcaaggcgacctggacggagagccgaccaagacgcacagggacgacgacgggcatgcgagaggaggattatagtcgcgagatgggcggtggatgatgaggggttgggcgacgaggagagcagccttgctcatctgtcgcttcgtccggccgccgcgcccttttgccccagcagcagcagcggcggcgggaccgaccgactcctctccgccgctgacgcgtcaagccagagacgcgaacgcaacaggaacgagcagccagcacagcgttccagagccggagaagggagcagaggccagcgagtacgccgtagcatacctgccagctcataccagcctgacaggcttcgttgattggcgggcgcgagctgcagcgacgaccgacgagcctctgctgcgccgtcgctcatccggcccgagcagctccggcacgacctgcctgcctatcgaccagcacctcgcaagcaacgcccgtcgcccgcccgcacccgagcgcactctcctcgcccgtatcctctcaggacagaccggagcttacagacgtagtccgtatcgcagcacgggcgcccgaccgacgactccctccgaccttatagcccttgacgccagctcgcccttatgttcggcatgaggagctcaccgccggtagctctcgcccacttcatggtgagccgctttcgaaagcactcctcgccttaagctggagctgaccgcgattgacaacaacacgccagcttggcaacacctacagctacacggagccgctctggctgcaccagttcgagctcgcgaccggagccgacctgtgcgttaatcgctcgagcgcatctcctctgccgatgccacgcctgactattccttctccgcaacctgtagggatggcttcgtactcaacttggggcccgaagactggcagtggacgcaagcacgtacgtcttggcagtgccacggccgcctttgcttgcggcgcagcagtcgactgccctgctcggacgatctgacgagtccctccttgccgacatatctccagtgaccgccgctcgactctgcccgccaaacttccggctctgcctctcgctcgacatgaatgtccttccgccgacgccagccctcctcgtcgatcgggtcctcacgtttgcccgcgccgaaggaggccgccatcagctacgacacaacggcaaggccgttttgagcacgtttggcggcggcggactcgagctcgagggtagaggctggaagggcgtcaataaatgtctgaaggaggctggcgagccggtgcgtccggtgtttcgaccgcccgtaagcctccgcctttgcccgagagtgacgccccttcatcaccggcctccgacaggtgttcttcgttccggccttcttccttccgccacgggcgatcctcgacgacccgtctgtcgacgcctccttcgcttggaacggcgcttgggagattcacggtccaggatctggctgcgttgaggagcgcaagtttgcgaccagcgtgcgtccggcaccggccctttaccgctcggctcggctcgctgaccaaaacctgttttctctcgtccagaaaaagccctacatgtcggccgttagcccttgcttttttacgcactacggcatggacccgcccttcggcttcaacaagaactggatctgtgcgtctttctcgctcagattcgaccgtgatgcgcttcaaaactgacgaccggtcttcatggacagatggcacggataacgcatggtacgcacgtcgctgggagcaggtgctcggggctaagcgactgcctgcattcgtccaggtcctcagctggaacgactttggggaagcgcactgtcaggccgctttgccccccactctcgcccccctcttcaagggccattttgctgacctgatcctgctgcccaacgttgcgcgcggcagacatcggtcccgttgagggctcacagcctggctccgaggcatggacggcctcgatgccacacgatgccctcctggcgctaacagcgcactacatccggcggctcaagagccctcacccgggtcggccgcacggaccagtacaggccggcgcggagcgcgtcgttctctggcaccgcccgcatccggccggcttgcacgcagtcagcagagacgcagtcggtaagccggccaacacggcctgggcggccgacacaatctcgctctttggccatctggccgagccggcgacgctcgtcgtccgcgcaacaggccgagacggcgccgtcgttgaacggtcggtcgatctgcccgccggcgagcacacgagcgcgctaccattcgtacccggcaggcagtcgttctatctcgttcgccgaggccgatctgttgctgagcttgaaggacgtgagatcgtcgctgacggcgggtgcgcggcgtggaacttcaacgtctggagcggcgagatccgcttctagcagcggtctgattcagatgaccgtctctgcgacgacgagctgagcgagcagttggcagcaaagggagccatacaccgcgaaaccgggggacacaaagaggggaagggggcgcaggccatggagatgcgatggagagagagagagattggcaggcagaaggagaatctaaagggagcgacagacagggcagaaaagagctggctagctctactgctgcttgcactgctgcgggtcctcgccgccctgggcgccggcggcaggtccatcctcgtcgtcatcctcgtcgtcgtcctgcaaaataggtgactatcagccgcctggttcaaaaatgcaaaccagctagagatggtgtacgcacggagtactcctcgccgtcctctccaaagtcgccctcgtcgctgtcctcgccctcgtactcgaggacctgaaacgagcgggtgggcatcagaggttagtcaccgcgctcgtagccaaccccagacgaagagagacgcaccttgccagtgaaaaagtcaacagccttgcccacaagctggacgggagggacacaaggctattagtgagcgccgggtagaacaaaaggggccaggaacgactcacccgctccttgatgtcctcgccgacctggtagtcgagctcgagccgctcgtccagcgcctcaagctcgtcctcgtcaatgtcgccagcctcgagcgcctccatgctcggcggcgagggcggcgagaagaagttgaagaacgagtcggtcggaacgaccttcttgacgatgcgcgtcttattggtcgctggcagaggggttgcgcgcggggacagagtcagcaagaaagccttgcgaccagcgtcggcgagaggacgtacacttgttgcgctgcttcttgatctcggtcgtctgcgtgaggttcttgtcggccttccacttgatctcggaacccgtagcgcgctcgtagactggaagcgcgagagcagaaatagtcagctatacgcaccctttgcagcagcaaaagagcgcaccacgcagtactcactgaagtcaccgccgtagccgacctcctcctggtagaagtaggtcttctcgagctcggcgttctcgaagaagtcattggggccaaagacaaacgtaagcttgaagccgggcttgtcgtccgacaggtacgaaagcttgatgtcgagcagggtagcgagggcctgaggacgcaagttgagagcgggtcagctctggcgtctaaaggtcgggcgtgagcagagctggagacgtacgggctcgtcggcctcggtgatgagctcgacgatcgagcgcgagttcttgagcgccgtcagccagaactcggggatacccttgacggcgtcggccttggcctcggcgccatcatccttgatctcggtgatctttccgtgcgacgactcgcagtccgagtcatcgcagtcagagtcggcggcctggccggcctcgatctcctcggcagtcggctcggccgagccggcgacgatggccgcccggcgcgagtagatgggctcgtagagcgaggcgaactgcgagcagcgagtgacaagatgtcagcaagaagggacgcctggcgcgcaaggtgcagcggaaggaaagcgagcgccaagagctcgacggaccttcttctcaagcgcgaggatctccatctggaacttggtctcgatcttggcgtgctcaacctggaggcccttgaggccgtcaatacgggccttgacctcctggggaagcctgcagagacgacgcgcacgtcgagcgagaatggtcaatgccgcgcgtcgcgagttgaccaggcaggcgcgctaggcgaggccagcagagtcactcacgactcaaggtagcccgagggcttgccgacgaggttagcgagcttgccctggacgaggttcatgagtgcagggttctgcgacgacatacaatggtaagaggcgtcagcgagcggctctcgtcggcacacacgtcggctcgggcgacttcgcgccacgtagtcccgcctgcccaacctccgactcgtgaggtctgaccaagggcatcccagagcaagcaccgcccttcgcgcgaaagattagagctcaacgcacctgagcgagcagcgaggccgggttgacggcggccgagtcgtcctcgccagactcctcgtcaacgtcctcgaccgtcggcttcgaggccggcgcgggggcctgcatgccgccgccgacgtacgagttggcgggcgtcggggcaccctggaggtgcgaaccgtttccggggatgttgaggttgccagacatgcttcggggtgtatgcgggtggaggtggtgtgtagaagggggcaggggaggtggcggaacgagtcgcagcccgggggcgatggtccctctgcgcggcagacttgccgtaaccgtcgcgtaacctcgtatcacgaccagccgtaactctccgcgctgacggcacccggtaactgctctcgccgggcagcgtcgtcgcagcagcttcgacttcgacctcgaccaccaccctcttcttctctagcgacagccacctcctccgacctagcatgtccagcagcccaggagactacgatggtcggtcctcgtgccgctgagcagcctcgcgtcccaggctaaccgccttccacccgcccgccgcccgttgcgctctcaccctccgatgccgacctcgcctcccgccagccgttcgcaaggacatcgcgagcgcgatcccgcacgacggctacgacgacggctcgctcggaccggtcatggtccggctcgcctggcatgcctctggtccgtcacttgtcgaactcgctgcaggcagccgggtcgtcgtcgtgcgagcgatccttgcggccagccggctgacacgggcttgtgcttcgccgtcccgctcttccacctcctcctttgcttgcatcaggcaactatacgctcgtcgacgtccgttccgtcactctgcagctttccatcagcatgcccttggtctgaccaccagctgccctccttcccgatcttctgcctcgcgtcccgcagcacaccggcggctcgaacggcgcaggcatgcggtgagtcgtatcgtttccgacaagggtaacgacctctctcaacttctagctgatgctcgcctcgctccttcccagcttcgagcccgagtcgatcgacccggcaagtgcgtcgcgacgagcccctttgatgctcgaagttacgctgaaaggagcacatggctgacctaccgctcgcgtcgctcatcagacgccggcctgcacaacgccatcaccttcctccagccgatcaaagacaagcactcgtggatctcacactctgacctctggacgcgttcgttccagagcaccatttcttcaaatctttgtgctctcattagctcacttctccgaccttccagtcgccggcgttacggcgatccgccaggccggcggcccagtcgtcccctggacgcctggccgaacagactacagtgacgcgcaagcggcttcgagccatcggggcgactcaatcgccgacaagctgcccgacggcgcaaagggggccgatcacctgcgcgacgtctttggccggatgggcttctcgggtgcggcccgccgctcccctctgcgtgtcgacgattacttgtgctgacgtggccgatctatttcttgtagaccaggaaattgtcgctctctcgggcgcccacgtccttggccggtgtcacaaggaccgctccggcttcgacggcccgtgcgtacctgccccccccccagcctcgctttcgtccttcaccgctgacgccctcctctccgtccgcccctcagatgggtgacgaacccgacgcgcttctcgaaccagtacttccggctgctcctctcgctcccgtggaagccgcgtgtctgggacgggccccggcaatttgccgccaaggcggccggcaaagacctcatgatgcttccgagcgatatggccctcaccgaggacggcgagatgcgcaagtgggtcgagatctatgcgaaggacaaggtgcgtcccgctcgaagatttgtgccggccgctgtcgatgctgaccctggccaaacctctctcgccaggagcgtttctacgacgactttgcaaaggtcagcgacctgcgcctatctgacagggcccttgcgcgtcagcgagactgacgactgggaccctatctctcgctgacaggctttcggcaagctgctggagctcggcgtcgaccgctcgcccgacggctacgcccacctcgtcgcccgggccgagcgcaagggcgtcgacgtcgacgacctcgcgccaaaggaggcgtttggcgagggcaagcacaaggtcgtcagccagctctcggggaacggcggcgggtgcccattctcgggcaagagcagcaggctctgagagcgatgctgcgagacgatgactttgacatgagcccactattttctatccttcgtctctaggaggcctgctcagcgggacccacgtccttttgcgagaacccaccgaaaatctgaacgagcggaaggcaacctcagacgccagagtgctcgaccgccttagcgcacgagcggcaggcccgagacaaccttttcgcggtaatcgatgtactcctggccgaagaacttgacgagtaggcgctcctcgtctgagtcgcgaaggacggcatagcgtcagtcagagcacggcctctgcaatcgttgagccttggacgcgacgcacctccgatacgctggaagaaccatcgccagaggtagccggcaaagaggacggccatcaccggattggcgaccatcacctgcgagccaacagcccaccagaagtaggcaaagtaggacggatggcgggcgtagctgtgagtcagaggcaggaagagagtgtcagcactgagccaaactgcgcgctcgacgtaggcggcaacgcacgcgtagacacccgaggtgacgaggacgtggtcgctcttcttcatgacggcaatgtggtggctgaagctcgcgctcgcgtggaccatggcgagcgtgcgaatgagctggccaaagaggacgatggcgaggccaacataggtccaccagccgacgcatttgagctccgggtagaaggcccgctcgagcgtgtactcgacgaggacgagagagtgggcggccaggtaggcgtagccgttggtgagcaggaaggctgtcgcacgcgagggaggtagcagcgaggtcaggccgagtggttgcgaggaagtgagggagggacaagggcacggcctgctgcgggcagccgggccgagcctccttgcctggacgcacacgcatagtcaaccttgttcggattccagacggccgtgacgacgtactcgagcaggtggaacgtcgtccaggcggcgaggtacgctccgagctgaggagtcgggaggagcgagctcgcgagcgtgccgacgtccgggagggtgctcggccgagcgagcgggagggcggcgagagccgaaagcgagcaaacggcgccgaggacgaaggcggtgagcgcgacagcgtacgacgggtgggctagtgacggcggaacaggcgcaggcatgacaggcgacaagacggaaagggagaaggcgggtctgaaggtggtggtcgttcgggagcaaggcgctgagcaaaggtcgggcgattcaccttgtgcttcgcgcggactcgaagaacaaaaggaatctggggtcccagaagtgataggtgataggggcagcacgctcgggcagcgaaggaacgcttgacgctgagtctaggcacacgagagtccaggcctgtaatcctggcgccagaactgcatgcgtgcaaaagtgtcggaagacggatgtcgctgaaggtgcgtcgcgcagagcgagaagagcaggtggcatcgtatccggtcgcctggcgggcagacgcgtcggatctcgtctgctccgacacgagcagaggcgactggcccggacggttcttgacctattacgtgaggagatagacctgggtgttaatgagagaggcccctgctggtcgctaactgcagggtgaccgtgcgggagacctgagcaggacgacactctcgtctttgagcccagctcaagcggatactggtgtaagactctgttgcgtctgcgctctacaacaccagagcgcgtccgcgagtcagtgacaaaggctatgcgaccaagccggctggcagcgagtgaaggacgcacccttgtcgttgccgccagtcgaggtgaggcgcaggcgcgggcatgcagcctgcaccaggctggcagccggactgcagtccaggcgagatgacagctgcctcaagccgagcctgtgggcttctctttgacggcgtcggcaaaggttggcgctccgccctcaccggcgtgagtggctgggaggtcgccctcgatacgagtggccttctccgccagcttgggcgctccctcgcctacaggcggtgaggagctagccgacgatgtgacgtggctggctgtcctcgggactgtgccctgaaagctgagccactcctgtaggatgagagagcaaggcagtcggtcgggtcagcgaacggagtttgagctgcggagggcatccgagacgagacgcacagggaaggtagcgtagatccccttgcgccggagcgagagggaacggacgttagcttcagtcggctcggccaggcgggtctgtgtgatccaaacactcacgaggaggaggcatccaatcaggtagaggaagacgagcggcaaggcgacggccgggctgtcggtgatccagccgacgaagcctcgcccgagctgctcgtgccgagcgttgagccacgagatgaccggcagccggtggaagtcggcgaggaactcgttcggcgaggggaacatgacgagccgacgaggtgggtgcggagtggtgttcagaggcaagctcgaccgactcaaaacagcagccggcagacgtcgtggccttggctgcagcgtcctcgtccgtccctgcaacgtgcaggcaggttgccccgagccacctcctggtttcctctttgcccgctccgacaaggagttggaactggcaagaccgctagcgactctcttcagcagtcatgctctgctatcaccggcctgaggggtgccatcgtcggctgcccgcctcgacgagagctcacgcttcgttcggctccgagcctctgctgggctgagcgttcggcactgatggactgctccgctcgacacgcaccgacttcgtgaactcctggtcaagggtcctcacttcacaggtcctctcagtgatacagccttgttgctgacgacgcgctcgcactcctgcaacgcaagaggcacttggccggttcccccttacgccgcgacgtgacgtcgtcgccgacgtcttctctatctccgcccatcacagactcagaccgaggcagacgaaaattgcatgtgatggttcgtgagaggtgagggtgtccagcgaaaaagggtcgagcgagcagcgcgcgatggtcggcttgcggtcgtgaagtcggtcactgccagtagcgccggaccggctcgctgtcgcagttcgaggggtcgccgttgggctcgccgaagccggggtaggtccgaccggtggcaatgcagagcggcccgcctggcccagcgatgccgcctccgactgggaagggcagaagccgagagacatcgtcagcaagtgtgggaacggtccaggcaaccgtcagagcgacgctcacggctgaagtgattctggaagcagtggccaggctgggcgcctggcgggtggaaagtctccttgcccttctgcgaaagcggtggcgcacaaggaggggaccgtcagcgcacttctgactcgccggagaccggccagagacggatggaaacgactgacgaagcgctcgccgagcatctgcatgatgccggtcagcatgttgccgtgccgcactgcgatcaggcacagaggggttgttagctcgaccggcccgagagaaacatgggagccggcttctgcacgactcacccccgatcgggagcttctccccgacgcgagccagagcgttcctgggcaggcgtcagaaggacgacagtcagcagacagacggtcgagccgctggttccaacgggatcgcacctaaacacctcgacttcagcctggagccggctggccgcctggaagtcgcctgcctcaagggcagccgccaaaaggcggagcagcatcttggcagggatgaaataggcgatggtcgttgaggggctgagcaccgacgggtcgagtgacgtggccgagaggcggaagacgcggtcgagcaggatgttgcaggctagccgaatctggctcgtgctgtgcgagttggggttctcggtgtcgagctgattgcagtgcaggacgaggagagccgttggccagagacaatgcgcgaggaagaggtccgggtcaaccgatcggcccgagaagtcgtccgtagcctttagcggatcccggcaggttgcggggaacgactcgctgcaggacggcaccgtctcttcagcgaccttggaaggggctttgagacccgggctgaagcgactgacccaaagcgcatgatcactcggtcgagctcgacaaagacgggatcctggcggaggtcctgaacgccgcgaacctccatcgagcgcgtgtaatcgccggccttacggaggaggatgatcgctttggcgcgaaggcctggcccgttggcatgctcgaatgggtgcgtcgttagtaggtcggccgagaacatgttttgcgcgtcctcgctcggggcgtgaccaggcccggcaggcaggggcgttgactgcgagttgaaacaagcggtcagagtggcggcctaaagcggagcgaaagcggagcgaaagcggctgcaaaggaggacgaacgacgtccaagaggttgattgcgccagcccagccggagccgaccgtagcgaacgagtccatcgtgaaactttagaggcgaggaagaaagagcctgagtcagcagacagcagacagcatgttcagtcgagtcggaggtttccgacgcacacgagccaccagaggtggatcctctccatccggtcaatgtcgtccgtggctgaatatcgaggccgagggctcaactcatcagcaggagaaacgccagcttgagcattcggacgacggacgacgcacctgggcacgagagctgcgggccaggcgaggtccgcttactgtcggtgttaaggccgagagggatcgcgagccgggtcgcgtggccgatccactgccaggtctcgacgaggaggccggccgagtgactgtagacggcgaggaggatggcggcgatgacgagactgtgccactcggatggatgatcgatcgacgactgaaagtagatctgggcccacttggcgtggattgtcgcaaagtcgtcggcgccgtcggcaagctgaccaaggccgtccgacgtcggcagcggcttctccgcgagccgctcggccgcgctccgcgtcagctggggcttgaaacggtccggcggtgccacctgcacgacgctgtacgggtgcgcaaagagggtgagatcagcgacacagaggctatacgcgtccagtagcagagagacatacgcagtatagcgcgccgagactgcgcagatcgcgtgaaggatggcaggatgcgggaagtcggtgtgcgagggtgggagtgagaggcgcgtgagaaagcggcccggatggaagaggccgtggacgaccgggaccgagttgagaaagacctgagcgagatgatccatcaggcccgggtgtggcaggtggggcggccagctgtcggtcgagagcaaacgagacagggttagtgttggcctcggcctcgggcgccagcacaaaagcggacgtaccccggccaaagcagctccgtcaggtagtcgtcgggcgactccatcgagtcaggcgtcagcttcgagccctcggccgacggtggcgaagtaaagccggaaacagtcggcatcggcccagccggctgcgagtggcgcgacccggacgcgaccgaggacgactgagcgcccgtttcgggcgactcgtacgaccagatctgaaccggcgaggccgcgaccggcggctggaggaagccgtctgacggatgccgctggaacgaaggcgagggcagcgacgcaacggccggcggcagcggcgctgcgaggagaatgtcgtctggccggaggggtaactgctgcgggccggttccgctgccgaggtcgctgatgccggcgccgacagcaagccggagcatgtcctcgagttgctggaccctcgactcgagctcgccctcccggccagcaccgagctggccttccttgctcttcttcttgccgctgctgctgccgttgctgccgccattcggcaggggcgccgaccgcgacttcttgggcgccgcgacctcgggctcgtcctcgtagtcgcagacgggcgctggcggcgccgtcagaccggaaggcagatggaggatcttgtgccgccaggaccgcatgcaagtcccacaggcaggcttctcggcgtcacagcgctgcagagcagggcaggatcggaaccgaagagcagattcgaacgagtcagcacgggcagagggcgtcggaccagagcgagggcgagcgacgaacgatcttcctcttacggcaggtgaagcatgcctggttgctgaaggggccgtcaacgccaagcggaggtcagcgaaagccgttccgccacgacctctgtgagcaggaaccaagtcgagggacgaaccgcttgagggggatgcccgcttccgccgcagcggccgcgctcgccgccgtcgacgcctgcgcggcggactggtccttcggcatggctgaggtcggctcggaaggggcgagaggagaggggagcagggttgcgagcgagtgaggagggagccgtctcgtttcgtcgtcgtcgtcgtcgtagagctgttagaggaggctcttgggccgggcgggactgtggctggatgatcaagcggcggcgcacagcacctcggccgaagtggtgtttggattaccgacctggacgacttgttcgcctgtctcgctcgctcttcgcaccttgactgctcgcggattgtgcgcacgtcaaggctctcgtcccttgatcaacaacgcatcatcgtcatgctcatagcgcgctagcgtcgcccgtggcggcgtctgccttgacgatcggcacctcggccgaggtagttgctggctcggcagcagctccagcgctcgcgctgacggcaggcgccgccgtagtgtcctccttggcctctgtcccccggaaggcctggtcggcactctgggccgtcagctgggtttggaaggccgagcttgtctcggtcttggtgacctcgcgcagcgccatcgtcgcgtacgcggccgtgccaatcttgagcttgatctggagcgcgaggaagcgggcgtcggccggggcgtcggcggccgtcggcggcgggtcgcgctcgaggatgacgtcctcgtcggcctgggctagcgagacgtccgggtccgtgtaggggatccgctgccagctgaggtcgcctggcagatggaggatcttgcggtacgagcccggcaggtggtactccctggaggatcgagcaaaggacgaggtcaatcaccgctctcctaagcgatgccaaggaaaatgcctcacttctgcttcttccacgagccctcgacatcgaggccgtcggccgtcaggatctgctcatacatgtcgcggagcttgccgccgggcaggttgacgtcaaagcccgggatcggcatgacgacgtcaaatatgttgaaggcgtggccgttagcgatgtcggcctcggtgattgtccgcgtcttgattgaccgcgacgtcttccagtccttcttgccccggccactttgcggcttggcggccggtggagccggcgtgggagcggcctcggcagcaggcgtcacagcgccagagccggaggctgcgcaaaaggagacaaatgagcatttgaggcgtcggtgcaggctggcaagtacgacgagatacgcacgcttcgagacatcgacgtccatgttgtcattggcggcctcctcctcggactttgccggggcggccgcagcgggcgcaggagcaggagtagcagcgacggccggctcctcctccttctccatgacgaggtcgccgacgaccggcttgccggcgccaaactcgcggacccgctccgagacgagcaggttccagacataagactggtaggcgtggacgtagatcaggcgcaggttgcgcgggatctgaggccagacaagagtcgtcagagacggcaggttgcgaagaagctcaggcacagacggaccgtgagcagggcgtcgtggttgttgcgctcagcggccggcttcttgccttcggctttgaagaattcgaggagtgcccgctcggcgacgcaacgccggggcatggctgcaagcgcggcatcggcgtcgccgaggttcttccagtgctgccggccctgctcggcatcggcgtgctctcccggccgcggccgcaggaggaggtcgacagcgagcgcccagtcctgctggaggatcgcgaggccgacggcgtgggtcgggatgtgcgacgtgccaaaacgctgcatgccgtagtagttgatgaagcccttggtcttgatcgactccatcgcgaggtccagcgtcgccgggtcgtcaacttggacgccgctgcgagacgcatagccgtatgagcgacacatcagtcgccagtcgtgagcgagagcgcgactctagacgcaccggagcgtgatgacaaactcgttgcccttgagcatgccgagctcaaggtacgacttgctgtactcgactaaagcggccaactcggtttgttcagcaaagaagcctgcgagagcgcctcacgtgtgtcggccactcacagtcaccgacgcggacgccgcgctcgccgcgctctttgaggacgtcgcgcaggctgcggtcacccgcgttgccagtgttgttgaccgagctccaaacatcgccgagctttttgcctccccggcgcaggcagacgcgctggacggtgacaccccgcttgtctttggtgccggcgacagtcaggtcctgcgacgagatgtgcagctggcgcgagagcgcctggaggacgtcctgcgtgtcgcggttcgtcttctgcatggtaaagtggatgtagggcggctgcgtcggcttgcgcactgagaaaggcgcaatctatcagccaccttgtcagggacgccagcagctgaggccacgcaccgctgcgcgagtcgctcgacatccagccgccgccatccttcccgcggcggcctttcgagtacttgatgacgatccgctgcccatcctcggccgagggcgcaggagcggcagcggccgggacaaattttgtcccattcgggtcggcatcgaccggcacggctaccttggcccgcggatcgtcggcgacagacgactcgagctcgccctggaagagctcgcggattgccaggtggagcgccgtccgagcaaccttctccggaatgggctgcgaagcgacgtgcgaccgtcaggtcagcaggaacgaccttcggaggacgataggttgacgcagaactaacctcggtgacgacagtgcgagtgtcgaccggacccctcggcgctcccccgccccagcccttggacggccgggcacctccccggtcgccaccgccgcctccgcgtcctccacggtcgcctccgcgccacccgccacggccaccaccgcggccaccgcggtcgcctccgccgcgaccacggccaccacggccacggtcaccgctccggccacgacctccaccgcggtcgccgcgaccagagccgccacggatccggagagtctcctcgtcctcggcgacgacgggcgcggtgtccggcgcgagctcggccgagtcggcggcggcagcggcctcctgaggagcgggcgtcgcgtccagagcaggcataatggcatccgtctcgtccgcaggctcggcagcagccggcgtcgaattgccgctctggtcggcggtcagcttggcctggcgctcgatgcgctcccgggcctgcttgacggcctcgtcttcgcgcgcctcgcggagggcctcctcctccatgtcattcatcatctcctcctcgtcggtcccacgcacgcggcgaggaccgccccagcccgagtcggccgccttttttgcgacggcgggcggcgtcttgccctcgagccagaggtcgcgcagccgggtgaccgtctcgatcccgaggagcgggacgagcgtcgccgtgtgcgacgccggccagcgctcgttggcctcgaatgggtcgacaaagtcggccggcacgggtggggcgacaaacgtcggccgcttgtcctccttcttctcgggcgcgggcgggagctcgggcatcggcggctcgaccggctgcgtgatgtccttgaggtgcagcgtctcgccagtgagcgaaacctcgttgacgaggaagtcggtgaagctgcgggtaggtcacgaatgtcagcagggacctcccagcagccgacagggctacgcagggccccacaggagggccaggagggaggacgagagggacggaccgctgcttgatgatgccgtgaaacgcgttgccctcgcggcggacatactctaggatgccgacgtcggtctccatcggcggccggagcgtctcggcgctgccgtcggccggcttctggcgaccaaagatgaatgtcgagggcgggaggagcgaggtcgagctcgacttgctcgcctcggtaggggcaggaggagcggcagctgcggccggggtctcggttttgatcttcttcgcggcaagggccgagggcgagggcgaacgcgagcgcttggcgctcgtcgtcccgctggcaggggcggatccaatgtccatcgagggcggcaggaatcgagtttggcggggaagggtggatgatggagggcagggcaaggcgaggagggcctcgcaggggccaggcgccgagggcggggggcgcggaatttggagccgacttgcaaccgcgaccgaccgagccccgggagttcgcacacggtcatctcgtcgactttcgcaggaagcgcgagggctcgtacacgagggaaggtcggggtcattgtgaagatcacacctagagagagacagtggcagaagagagacaaaggtgcggggcagtggaggcatgttggcgtgaagggggagcgaccgcggtcgctaatgtgtgaggtgtgaggcgagagcaaacagggggcgagagatcaggagacgggtggctttagacgaggccgtcgtagagcgagagggcctagcgcagagaagaagcagcggcgtcagcttcgattttccggcgagcactaatccacgcgcagggcctagacgcacctgaacgattgtcgggtccttcttgctgccctcgacaaactcgttgtagtcgagcgaggcattcttgtccttgtccatgttgtcgaagatctggagagatagtagtgagacgtcaggtcggagcgtaggccgggcaggacgcgtgcagctgtcgacggaccttcgagacgcgctgcggacaagaacgagggcgatcagaaacgggtcagcaggagttgcagacctggcactggaagatcgacgcaccttctccggcgtgtcctcgtcctcgggaagcgtgaccatcgtgcccgtcatcttgtagatcgacttgacaatcttgagcatctcattgtaggtgatgacgccgtcgccgtcaatgtcgtacagcgtgaaggcccctgagagcggcagaatgcgagatttttccacggtcagcaggcagtactttgctggagctgctcgcacgctcgcaggacgcacatttaagcttctcgtcgagccggccgcgcgacgttatgctgagcgcacagatgaactcctgagagacgggaggccgtggcggacggagtcaaaaaatatggtcagcactgcgcgcgctcgccgccgaaagcctggggcgctgagacccgcgagggcgccgccatctctcgccggctgggccagaaagacgaccgaggggccgcaccttgaactcgatcgtgccgctgttgtcctcgtcaaagacgcggaagacaaactcggagaactgggcagggtcgccgaaggggaagaactgcttgtagatcttcttgaactcctccttgttgagctggcccgacgggcagtccttgaggaagcccttgtacctaaagacatggcggcgcagaggaggaaccgtcagcgctctaatattgcactgcgagcggagcagatcaggaccgcgacgcaccactgctgcagctccttcttgtcgactggcaagggagagcgaagattgtcagcgcgcgtacgatggagaccggcgaggccgggcgacgaagcgggcagtgcaagtgggcccctccttctccctccaatctcatcttcagacaggccctgccatcactgcaagtcgtgcgacacgttgcgtccgacgcccctgcaggtcgtctcgccatctcacgagccatcggccgcttgctggcgtcacctcaggtgaggaagcagggaagagggcgatgctgtgcgggtaccctatcggcgcgaaagacgagggagaggaagcctagacgcacagtaggtgttcttctgaaggtccgagagctgctcgggcgagagcttcgactgattctttcccatggctgcgaacggacgatgagagaagcagagagtgagagagagggtgggcgttcgagagagagaagagggcaagtcgacacgtcgaagaggcccgccctctttcaaccgcgccgggggcggtgcaggccgctttcgatcgcacgaccgcttggcggcccgcgcgaggcagggcaacaaacggcccggtcgcccctgctgcagcgcctccgcctgtcgtcgccctctgccctggctggctgtgccgccctcgcaatcccgaagcgacgggcctgagctgcctgcacgccggctccggccagagcgcaagagatgagcttacacgactgacacggcagtcgctcgacatccaagactcgcaggccggccagcagcgaaacacaccaggacggcttgcgactagtcttgacaagcgcacggccgggcccgacagcagtcgacgagcgcatgcaagaaggtgctgatcatggtggtaaggaggtcgccgatcgggcagtgcacgacccaagacgacaggaggtggcttcaggacgctgcgaggcgctgcatagcatccgactgatcttcgccggcgcggcgagaaaggcagtcccttcttctgttgctgggctgacgcgtcgaacgcctgctggttcgctctcattggccggtttcctttgctgctctgggcgcgttggtgattgaaggcggcgcgcctgccttttataaccgacctatgcgactcatcaggctccctcctcgtccttcacctctgccgccagatcccgagtcgtattgaaagagaagggcatgagatcatgaaaaaaggagctacgaagagggatgctgatacaactgaagcctgcagagaggcagaatgggaaacggacgggttgcgagcgacgagagcgaggcactcgtctagtgccacgagccgatgggagcgccaaagtaaccgatctccgggtcaaccttgagccggcggcactggctgccgtcgcagttgtcactgtagatggtgttggtcgcccattcgccgatgacatcccctgcgctggtcgaggagattccaccaaagataaggagggcagcgattgggatggctgagccgaaggcgacggcgaggatgtagttgtacttggaccaccaggcgaggtagcgcgtcttgacccagacctggaaaaagtaggcgacgatgacgcccgggaagtagttggccatcgtcgagtacgggccccagctgcaagcgcgaggaaggaagacgtcagtcgggaacgggttggacgcaggggcagagaggtcgatcaaaacgcacgcaagggtcccgtagatggcggtcgggacgtggaggtagcggaggatgctcttgggccacatcttggtcgcgaagtaggcgatgacggggaggaggccgccgatgccgaagccccagagcagcgactgaaagacgcacagaggaagggtccaggtcagcaaccagtctggtcgaacgtgtttgcagccaaaggcactcaccgtgtagatgccgtgggcaccaaagacgcgggttgggccgagcgagccccagaagacggtggcggtgaagaaggtggcctcagagttgcagatgaagtgctggggctggtcggtctggcagatgcggtcgagcgtgatctggtagttgaggacggccgtcgagacaaacgtggcaatgatggcgccgtaaacctgcaaaaagaagaaaggtgtcagtctcggcttcgggagggcaagcggccgggcagaacggacctggacggcaaacgtccagcgctggccaatcttcatgtagtgggcgagcttgaggtcctgcgcaaacgcgagggcgttcatgcaggccatgacaccgtatgacttgaagtagttcatcgcgagggcgttgccggggtagatgaggccgccgatgaactcggcaaagacgttgagcgtgatctgcgcgttggtgatactgtagataatctgttggaaagcgacagagccaaaaaaggtcaaaagatgggttagctcgcagttgcaacccgtgcgagaggataaaggacgtacgccgatcgggatgacaaagacgatgcagagggcgacgccaaagaagatggacgagaccgacgagtgcgtcggatagacggtgaggccgatgcagccgaggacgatggcaaagacggtgagcgagaggtagaccctgcaggcggagggaggtggaggagggtgagcaagcgagagagaggcaaggctgcagagcgaggtttcggacataccactcggggacctccttgtacttggacatggcctggttgtggtagtccttgaaggcgaggttgccctgctggccggcccggatggacttgtaggccgtcttgaagccgttggcaatctccttgcggtggtagaggatcgtgtgcgtgacaaccgatgagtaggcggcaaagaagcagcagtagaggacaatgctgtgaagacgaaggaggcgtcagtcgatgcaggacgacagaagacgacatggcggcgacatacttggaggcagccatgtgaggctcagagtaggccgagtacttctcgacgtcgagctgctgctcgctgtcaaggatccggctgacattgtacaacttgccggtgtttgcgaagattcggttgctgaccataggcaggtagcccgtattccacacgttcgaccttagcccgccaccgttcacgtcagcaagcctgcaggtggatgctgcacggggaagagaaacgtaccaccagaagccgaggatgataggcccggtgatggccatgccgaggaactggttggcggtcgagaagaacggctggaccatcacagtcgtgccaaagaactgcgaccagtcgagcgtcgggattgggttgaggccgaggccgccgatcgtgccaaagacggcggcgacggcgaccgactcggtgttgatccagttgatccagttgaagtacgagatgcctgcggacgatagaaagagggtcagaagaaagcctggcagagatcagttggccatggcgacgtacaggtcatgagcgacccgggcagccagtagtagaagaacatggcggtaaaggctacggcgaagaatttaaggcgcgagatgcgccagccgttggcgaccgggttggcgttcgagtggaacgacttgttgagcgcgatgtacgagaggttgatgagccagatgcagtgctcggggtagacgatgaagcggcgggtcatgccggcaaagcccatgccgatgagctggatcgagaggccggtcaggatctggtagccaaagtcgctcgcccagacctggccgtaaaagatgtcgagccgctggacgatgaggacgttcatcgtgtagggcgcaaacatgccgacgttggccatgatcgtgatgagcatgtgctccttctcgttgaaagggccagggttgctgcgcaagcgggacgtggtcggcatcagcaagaggccgcggccgctaggcaaactattcaggacgaacagggtaatgtcgtggccgcggatcttgaagaggatccgggtcgggaggaccttctcgagaaacttggcgatcgggtacgagactggaagaggggagcggaggcgggcggtcagcgctgcggagggcgggctcagccgacggaagacgcacgcagctggatctcgttgacgctgagcgtgaacgacggctggcggagcgagaagaactggttgatgaacgagccgagcccgcaccaaagggtaccaatgagccagacgcgggccgtcgacatgtactgcgacgggtcgtcctcgcacttcacgaccgaccggacctcggggtacggcgacgagaagcggatgaggccggcctcaatcttcatctcctcgagcagcatctcgtagttttcgagcgtcgacgagtcgcccgagagaaagtactcgatcttgtccttgacctgggtcggaaagttggggtcgtgactgtgctcgagccaggcgtcctcgagaatctcggtcacctcctcgagagagagcgcgatcgcccggtcgtagatggcgtcgatgtcctgaggcaggacgacgaggtccgaggtgacggcggcgatctcgacattgtcgtgggcgtgctgcagcaggaggaggagcacacgagtcagccctgtcggtcgacacgacacctcggcccgccggccgaagagacaactcacaaacgagcccgaatccttctcgtcaactgggtactccttcgttggcggggcctcgaggccccccttcttgtcatcgtccgtgctgtagttcatgctggtccgccgggcgccttgagagctgaggtcaggtccgggagggggagggaggtcgtgtgggtgggaagaagagctcgcgatccttgctcgctcgtctcggacctttgagagatgggctatcgcccgacctcgtccgacaaggcgtatctcagggccgcacgagcagatgggacctcgttggaccacgcgtggcttgggcggccttcgtccaattatggctctcgctaaagcggctctgcgagatcaaggtgggcccgatggcggaggtcagccctgtaagccttctccagctgctattcccctcctccggcgggtgacgagcgcgccgcgtgaacagagcgggctatagaggtccccggccgtaccctcccatctcgcgaaagaagacggataaggtgccatcggcagtcgctcgctcgctcggcacgggacgtcaggcgggctcgcaagcccggtcgagccatgctgtcgggacgcttcccctccggcctcgaaatagacacgagccggaggtgaaatcgctcctccgagccgccggtcgcagcggctcatcgcgaagctagccttgtaatctcgggtcggagtgatcacaaggcccagcaagtcgcgttcgacgctcccaaccacaatagctcggctgcgaaagcagggacggcaattggtcgtcggcggcggcggcagcgtggcggaaggaggagggagagtcggccctccttcgggcggcagcgaacctggtcagctggcggcgcaccttgtcagacgcggctgtcatgccatgatgcggccgtcgcgtcgtcgctcggtcctacaatcagcgcatggcgtcgaggcaggagcgttgaaagggctgaggctcagtcaggggcgcaagctcgagccgagcttcggagccagctggcttggcccggcatcggctccgcctcggcctgaccgcaagctaaggtccgagtcgagcgagcgctctccagcgatgggcatcgcgcggacctcgagaagtggctcttgagttcagcaagacggggcgtcgcgtgagcgaaggcgtcgggagggaggacggcagccgaccgcgaacagcgctccgccgaccttcgcaccatctcgcgcccgccagccgacggcaccgccggcatcggcgagaaggctcatctccctcgatgacacacgcggtgctgcctctcagtctcgcgacgcggctggctgcccgacgacgatatgggaagctggggaggggagctgaaaggcgaccaaggcgggccaggctgcttctggcaacgagcccagcagcccgctgcgctgggcaaagcctccgacccaaattcggcccgccgggcatccagcagcagcgcctcttgctcgtcagaccagctctcctcctccgtacatcgcctcgacagctcccgcccctgaacgcactccttccaggtctcgcacgagcttagcttttgccgcctcgtcaaacctcggtcgtcaaacctccctctccacgccagtgcccgcgccccctccctctgcgagcgcccggccttcatcagcgccctcccgtcgtccctctacccgccctcactccctcgccatggagtcctctccgttcaagtcgacgctcacgccgacggcggcgccctttgtgccgacagcatcctcatcttcctcgtcgcggccgaccaagccgctgccgcgggccaacccgacgctcgtgcccatcccggcgacgacgcctaagacgcccgtccagaaggaggcgacccggcggctgattgtcgtgctcgagtcggcctgtctcgaggtctaccggatcagcgccggctcgggcggccgggacggcaagggtggcaaggaggcaaagtatgcgctccttaactgtgacgaccaccagggcatccttgcaaagaccggccgcgacattgccgacgcacggcccgacatcactcaccagtgcctgttgacgctgctcgactcgccgctcaacaaggccggccggctccaggtctacatccacactgcgaagggcgtcctgatcgaggtcaacccgcacgtccggattccgcgaacgttcaagcgcttctcgggcttgatgggtgcgtcgtgcttcgctgctgcctgcgcctcggctccgagctgacctgcttccgtctgtcagtgcaactacttcacaagctgagtattcgcggcatgaacggctcggagaagctgctcaaggtcgtcaaggtgcgtcgctcagctatcgcatgtcgacttcggccagggttcgtcgtgctgacggcctgtccctcatccacgcccggcttgccagaacccggtcaccgaccacttcccgaccaacacgatcaagctcacgctctcgggtgacgtcccgactgtccggctgtcgcagttccttccaaccctgccggaaacgcacagcatagccgtctttgtcggcgccatggcacgagggtgcgtcgccgcgcgtcagtcagagctggccggccccgtcgctgactcccttctgtcacgtccgccagagaggacaactttgccgacggcgtcgtcgaccagaaggtttcgatcagcgagtactctctcagtgcgagcgtcgcctgcggcaagttctgctgcgccatggtcagtccttttgctcctctcctcatccaagtcgtaaacgacgcattcacacgctttcttccctctcgcgcttgcaggaggagatgtggaacatcatctaatagggtccttggggctcttgccgggctcgacagcagtcgaaggccggccggcactcaggaggacgcggggacgcacagcgttgtggccggacgccgtttgtggttccagtcggcgctcctttggatctcatcttgttcactatgcctgcctcgtcctctgcgagccttttccagtcgggtgagaggtgggatcgtgaccgccgtacatgacgaccaggtcgcccgaactaatctcggcgcgcaacgacgacgcgcgcgtctcgacccccttgttctctccgctcgaccgtcactcgcccttcctcaacatcctcgacggccagccttcttcatacccttcccaaggttgtcagtcgagcccatgtccgccgacccagctcgtccgggcccacccggggcatcgccgtcggcgagctcagtcggcgcgtcgccggcgggctcgaagccagcctcgacgtcgttgtcggcccctgcggccgccgccttgagtgccgccgccctcaagccggcttccaagcctcgcagctccatctttgagcgcgtccgggtggccgctctgcgtaacggcctggctccgacctcgtcttcaggagggttagcagcgatggccgcggcggcgatgacaccgacctcggctctcggcagccccgcgctcgccgacagagctcctcggcccgccggctcgccgtcgctcgaacccgggcttggaggcgtgtcgacagcaagaatgaccgctcctacatcgtcaaagccgtcaaagccctcagacgaggccgacgaggccgccatcgagcacgcgctcttctcgtcgcccgagaaggtcgcgcgctcgctcccgccgccgtcgccgccgaaattaacaatggctcatccttcttccagccaggcctcggcggctgagccggtgccttcgggacgttcagcggatacgccgcagacggtgccgacgttcaagaagcgcgtcaatgcgtcgggcgctgtgacgccaaccgttgcaaggtcgccggttccaactgtggtcggcgcacgccgtccgtctctcgagcttggggacaaggtgcggcctcctatctcgccggtttgttttgactcgcaggatgattgacgcctatcctcgacctcgcagcccggttccatcgtctcggccggtacgtggtgccacctcaacgactaccgttcgcgcgcagcgcattaacccctgcacctccctttcatccttcgcctcctcaggcgaccgcgttcctcacagcgcgcgctcgcccggcacgactggcgcctcaccggctgtccgcccgatcgcaggatcaacggccggtccgagctcgcaacctgcgaagatgaagcagactttccgtcggatcaaccgcgacgccccgctcggcccgccttcgaccgcatccggcctggcgacctcgacagtagctacagcctcgcccagtgcggcacgcccgccaccagtctctgtccggccgatcatcgccgccgagactgctgctggagctccctcgccagcgtcagcaggctcgacctcggcttcgccagcgctggcgcgcctcgctgtctcctcgcccccccgcccacagactcctgccagcgctgcttcgccgcgatcaagccctggtacgataacggccccggctccgttcaagcaggcgccgacaacaacgagcactcacacgccaggtgacgctggccggcatttacccgatgagccctctgtcgtcaagaagccagcgctcgctgcaacgtcgccgccgcccgtcgtctcgagcgatagtcagagagcgcagcttgcgccgactttgtcaccagctccaacaaccatcgaggtcaaggaatcgctcgcggcgaaggctgcgccagctgcctcacctgttccgtctgtcagcgccagtgcaacggccgccgtcccctctgtcgctccagcggttgcccagccaatctcgcccgcagcaacgcagcagcaggctcaactcttcaacccgccttcgtcgtcgaccagcagcggcccccggcctccgtcaccgcagccctcgcccgaacatgcgctccagggtcttagtcaggcgtccgacatttcgccctctgcaacctcagggcctcggcgcgacccgcagcaggcttcgcctatcgtcaaggatccgacccgagacgcgcaggaaggcaagcccctcgcgccagtgccctcgccgtcggccgggcacgcggcaccgtcaccggctgtcggtcgggcggaccttcccagcgcgagcgcgaaacctccgtcgtcgtcgagtgctggccccatcaagaagcgggctcgcgccgtcctcagcgacagcgacagcgaatcgtcgacgccggtcgcactgccggcgtcaaagaagcaggcgacctcggcagacgcgagccggattgcaccctctcgtgcgacaccgaccgtcgctctccagacgccgtcactccgctcctatcacgtgagctcggatgaggacgacgttccgctaggcagcatcatctacaagaacgcgtctccgtccactagccccaagccgcgctcggcgccgccgccgtcatcggagccgaatgttgcagtcgccgctcagccgccgtcgaaggctgccttgccgtcgtcagtggcagagcccgccgtcgctgtcaaacagccagccgcagagccgacgccagcactgtcgtctgcgcccgcaccgcagcctcctgtgtccgcaccggtcaaggaagatccgttctttgtcggctcagacatggcctcggacgacgacgacgacatcatctttgtcgccgagcggccgcccggccatcagctcatcattcctcccaaggcggccgttccctcgacgaagccctcagcgccggtgccagagcccgagtcgtctgagcaggcggacgagaacgagccgaccacgcagccagagtcgagcgcgcaggcaaacagccgaccgtcaccccggcgggtaacccggcacgaaagcccgccgtcgtcagatccgctgaacatccagaacggcgaggcgttgacccgatcggtgtcgcccgtcgtcgagaagacaccgcactcggtcctcatctcgccaaggaagcgccgtgtcacgcgggcgtcgacctcagaggttgatgagcccgcaccgagcaagcggccgcgtcgagctgctgcagccaagggccgagcatctgccgccgtcgacgatgagagcgacagcgagcccgatgcagagggcggcaacttggacgacccgagggagaaagacgtggaagaggtagaagaggacgacatgatcctgcggcttcaccgaagttggtgcgagagtgagtggctgaacctcctgacgacccttggacaagccagctgaccagttcttcttcgctctcctccaaagagtgcgaacgtgcgtgttgccttgatgccctcgaggggcgctgcctgaagctgacagccgaacttgccttcgcagagcctcctgccgacgagcttctcgctgccctcgagaagaagcgcaagcgtggcgggcgcaagaagaaggccgcctccttggacgaggacgtcatttcggacggcgaggccatcgagcagatgggcggctggatcgaatgccagcggtgctgtgtggcctcgcactttggctgcctgtcggccgaccagcggtccaatctgctcaagcaggtctcgctgaagacgggcgagaagcagtacacggtcgagattggcgagacgtcggttagtctcgggcaatctgaacggactctctctgcctgactgacatcccctccttctttgcaacggcagtcgttcgtctgcggcggctgcgccaagaacccgacctgcttctcttgcggttcggccgacatgcaggagcagctcggtaagaaggctgtcgcctctgccgaacgcgtcgctgaggccgcaacggcaccggaacagaccgcaccgacggctcctgccgatgacgcgcacgccatggaggtcgatgctccctctcttccggttgtcgccccgtcgggcgccgcgcaggctccgttggacgtcgacgcacctccagccgagaccaaagccgacgggtccgacgaagacgacgacaagcagcccatcttgttcttccgctgcttccgttgcaagcgcggcatccacgtaggtcaaacctgccagcccatgtttgagcacagctgacgaaccccccctccgcgctcgccctcgttcgcagtactcacacctgttgaaaccgcgcgaccttgacaaggccacgcctattgagattgccgcccaccaccaggacgccgactggcagtgccacgactgccgttcgtgccgctgctcagccttacgtcccctcacgagtgctgacctgctgtccttctcgcagtgcgctgggtgtttgacgtcgacaaggtgatcgcctggcggccctcgccggcgaccgcggtcgaggatccgctgccgccgggcaccgctgccgactaccgcaagcagctcccgcgcgagtacctcgtcaagtggacgcagctcggctttcgccacattgagtgagtgcctgcccggccgccccatcgtccgcgtctactcgcgagctgaccacgacctcccccttccacaggtgggtgccgcaccaggtcagtcttcccgtcgcgccatgtgctgagaccgctgccggctcaatactgactcgccaataaccccttcctagtggctccttgctaactcgaagcagcgcctgcgcaactttctccactcgggctccgacctggctcccttcttatcgcagctgtcggccgaggccgccgatgagcctgcagaggaaggcgctgtcgcgcaactgctcgctctcggcggcggacccgaggcagagagcgcggctgcccttgacccgaccggcacggccatcttcactgccgtcggtccgccggcggccaacccgaacgccgacgctcagattccaacgtacgtggcgccggttgaaggttgaggcctggaggctgactcgttctctcctgacctttgacccgtccccagcgcctggaagacgatcgaccgggtgctgaccgtctggctcaagcgaccgagcaagcgctcgctggccaagaagggccgcggcggccggcgcgtctacgatcgagacatcgacgacgaggacgtgcttgagctcgagcctggcctgcggcccgaaaacgaggagatggtgcgtgcttttcttcctttggatcttatcggaccgacgactgacgggctgtctccttcgccaggtcgacattgacgagtggcaggagattaccgcccttgcgctcgacgagcgggcgatcaagcaggtcatctgggcctacgttaagtggcaggacctgccctacaagcttggtaagtcgaccctcagctcgtcctcttgcgcaaccccgctctgactaccaccgcccctcacatccatcagccacctacgacacgcccccaccaacctcggatgtcgcggcgtacgcggcgtttgagcgggcctggcggtcctacaccaagggactgcagacgatcgttccgatcctcaccaacgccgaaatcgccgctcgcgaggccaagaagaagtttaccaacatccgcagccagccggcctgcgtcgtcggcgggacgctgatggacttccagctgcagggcctcaattggctctacagccagtggtgcaagggcacgccgtgcattctcgccgacgacatgggcctcggcaagacgttcgtcgctcgttctcgccagcatcgactgtcgcagcctcgcccgtgctgacgaccgatctttacgcacctgccctccaacagcgtccagatcgccgcgctcgtcggctttcttgcgaccaagcactgtgcgttgccgacgccaggtcagagtcaccgctacgcccagctgacggctgctcccctgctttgctcgtcagactatccgaccttgatcgtcgtccccaactcgacgatctcgagtgcgtgttgtgacgacgtagtcgcgagcagggcaagctgctgacgtgcgaagctggccctctgcttgtcagactggatgcgcgagtttgaaaagtggatcccggacgtccgcgtcgctccatgtcagtcgcgcaccgccccttcgaagacactcgaggctcggcctgactcgtccacgcttcctctgcagacaacggcgaaaaggacagccgcgccatcatcgagaactacgagctcttccacggcgacggcgacggcgccggaggccgcaaccgaggccttaaggtgtacgtcctgccagcaggtcttcgctgagctttgtgacagcagcagctgacgagcctcacctcaaatcgacaaacgcaggcactgcgttatcacgacgtacgaggccgtcacgcacgtgagtcgtcgtcgacgtttccgacgtcactgcgcgccccagctgacacaggcctctcgcacccctgcttcagaaatccttcaacgaggtcttccggcgcgttcctcggtgggagatgctcgtcgccgatgaggggcaacgacttaagaacggtgcgtcctgtcgctcgtcctcccttgagtctcgcagacagctgaagacctccccttgtcttcaatcgacggcagacgcgagcaagattgtcaagtctcttgggacgctcaacatcgcccaccgcgtcctgctcaccggttcgccagtttcaccgcttgagtttgcgttgccgattgctgacggcgagccgccatttgctctgcaggcacgccgctcaacaacaacctgcgcgagctcttcaacttgatgaacttcctcgacccggccaattggagcaaccttgaccagctcacggccgagtacgagtcggtcaacagcgacaatctggctgcccttcgcgagcggctcaagccctagtgcgtctgctcggcagcgagcttcactcagagacagatgacgctgactgaggcccctcttgaccacagcttcctccggcgcgtcaaggccgacgtgctcaagctgccgcccaagcacgaggtcattgtcccaatcgcgatgcgcagcctccagcgcgaggtctacaagggcctgatgatgtgcatcgcgccctcagtggcaacgagcgagacggcccccgtattctgacacgtcatcccccttcccaggtccaatgccgagctcatcaagaacctggtcggcggcatccagcagggcaacccgaggcagctcgccaagacgatgaaggcgaccaacctgtcgaacctgatgatgcagctccgcaaggcttgcgcccatccgtacctcaaccaagaggatatcgaggacaagacggtcgggcccgaggagatgcacaagcggttgactgaagcctcggccaagctatcgtttctcaagctgctgctgcccaagctctttcagaagggccatcgaatccttctctttagcggcgtgagttctttccctcggcgctccgtcgtccgtctttccgtcgcttggacgctaatcgaactcctccgaccgggcagtttgtcatcgcccttgacatccgtgagtccgggcgcgagtcgcttcgatttaatcgagtgcttgctgacgaccgggtgccaaccttgcagtgtcggactggctcgatggcgagggcatccccttcttccgccttgacggcaacacgcctcaggaccagcgccagaaggatatcgacgccttcaacgcgcccggcgcgctgaccaacctcttcattctctccacccgcggtgcgtctctcgcgtacacgcaggctcagacactgcgctgacccctttgccgtctctccagccggcggtgttggcatcagtgcgtcgctcagccctgctctgacagaatgactggattctgacgaaacgatttggcagacctcgcgacggccgacacggtcgtcatgtttgacgccgacttcaatccgcaccaggacatccaggtgcgcctctgagcctagagcaaactgcgagacctgcctctcctaactagtgtaccgatcgtgcaggcgatcgcccgggcgtaccgcttcggtcagaccaagaaggtcatggtcttcaagctgtgcgtcgcggagcgcgtgcgcagaccatcaccagaaccactgctgacccgcttggcctcgccaggatgatccgcaactctgtcgaagagaagattctcgagaagggcaagcgcaagatggtcctcgaccagctgattgtgagtgttgcgccgctgatgctcgaacgcgcagatgctgaccccggccgacgctgtgcccgttgcagatccaagacatggccaaggaggaggacaccgacgtcggcagcctgatcgcgtttggcgccaaagcgctctttgccgaggaggaggctgccgtcaagcattacacgagcgaggacgtcgacggcatcattcagcgggccgagacggccgaggacgtctccgaggccgacggtggcggcggcggcggcggcatgaagtttgactacgccgagatctacgacggcagcaaggacgcagctgccgagggcgaagcgtcggccgctgcagacgccgacgaggacttctgggactccatcgtcaagcgtgcgaccaaggaaaaggaggagcgcgaggaggctggccgtggtgcccggcgagccaaaaaggtcggtccgttgaggtcgaccctgcgccctggactcgtctggttgctgatccctttctgcgcagacaatctacgtcgagcagcttgactcaccgccgccagagggcggcaagccctctcggcaaggctcccgccaaggctcgcccggcttcgactcagacgcagcgaacggctcgtcgtccgacgactcagactttgaggttcctcggagccttcgccggcgctccctgtcgctcgacgaccttgcatccgccaacaaggacggtccgggtcctctggccaaggtaaagcagcccaagctgccaaagatccacaaggccgcccgggatgccgtcagcgtttcggcaccgatccctggccaggccaagtttgtgaaacttgagcaggcgctactcaagatcgctacccaggttcaggtcgacctcgcctccctccttcggacgatccacgcgacgacgacggcgccggtcaagcgccgcgagctctgggacatcgcgctaaatctcattgcctcgcacctcgaggtctttggcatcgcgtcctcgacccagctccagccgctcatacggcgcaagaagttcgcctacagtttcctcgacgcgcttccgtacaacggtcgcagccaggctccggctcctgctcccttggcctcgtcgtcgcacaatgacgcatcgtccgttgccgggcccttaaatccgagcggtcagcagtagccgcagcgctcgtgacgcaacctctcttggcgtccccccctcctgctttgacacgacctccctcacgacccatcttgctttcgccgaatcacctgctgcacccctcatgacgctcgccttcctcttgccaagataacgactacgtaacgtgacggaggcatgggatcggagagagcgggcagcggaggcagcgctcagaggttgtcaatccggccgccgtcggtcgctggctcgaagatgagggcgccctcgctcttccgaacaaagagccggcggacctcgcaccagatgagctcgcgtagcttggcgttgtcggtgccacggtcccagcgccagccgagaaggacgttgcggaagctgttcgacggcatgccgtcagtcaaagcaacaaagagcgcgccttttcagcagcatggtatcacgcaccagttgaccgcggcgagcgaaacgtcgttcttctgcttcgccgggaggatgatgtgctggacggcctgcgagatctcgctcgggtgctttgcgccggcggcaggccaggccgtccggatcgcatgccaccaagcggcggtgcgctcgtctttgagccgctgctcgcccgtcgcaaagagccaggtcgtcatcgccgactcgccgacgtcgaagcggtggcaggcccaggcgtcgtcgtcgttgcggtgcctggcgagggcgacaatgacgcgtggtgcgctgccgcttgtgccgccgagcccaaagggcgcccataggccaatgaggatctcggccgcgtccttgtagttgcggtggaagcaggccttgttgaggaggtcgccgaacgagggcggcacaaagagcttgtcgaccgggctgctggggtcggcgcagatcttgttccgcagccagcgcttgtacgtgacggtcgtccagatggtgagcgcaaagctcgagactggagacagcaaggcgagagctgtcagcagattggcttggccttggggcgaggggagacgtcacggaccctgcgcatcgagcgagatgtcctcgagtgtccgcgtgaaggattcttcctgccagaggactgccagacgaagcgcaggcacatcagtcagcccgcggatcaactcttgagggagcgacgagaaggacgtactggcccaagcgtacagacgctgcgtgacgaggtcccaaggccgcgggtcaggcagcctcgggaagatcgggtcctctgacagcgtcgatgcgacagtcggcggtcgcgtatgccgtgtgtctgttgcgacgagcctggatggttgacggctgctcgcctgctgggcgaggtcgtgcggcgcgagggtgtctggctcggacggcggcgtcggcggcagggaccgctcgatcagctcgcgcaccgcctgctccaagttgttagaaagcagagggcccggcatcccacggtcggcggcctgctcaggggatgtcgctgccgtcacggccgagataaagtcggaggcgctcgagccgactcggccttcagcgtcacgagctgcggcaacagggctgccgtgctcgtccgagtgaatcacggctggcgacggcggttgcacgtggattcgaagcgaggccgggccagagttggccggcgtaggctcgagcattgcagatgtctggatgcgcgcggggagaaccgggaggaccgtctctggcaaagctggctggaaagccggcagcggcccgtgctggctgtcgggcttaaagaggagccctctcgggccggcaaagaagctgtcggcgtcggacgggagggccgagggcggagagcgcggagtcggtgaggtcttgtcgaggagctcttgccgaagcagcgccacctcgttctgaagcgcgacggcccacgtaggggcgtcctgtagcgtccaaacaacagctgtcagcggtcagacttgtcgggcgatcataattaaagaagacaaacgctgcgatccgtgcccgccggcgaaggcaaggtcgactgcggtcgagcaagcttcgatcagtttcagggccgtagcctgcttcagtcgcgcaacgcactgctggttcgggaggcggcgtctgaaggctcgacattcgcttagcgagcaagtccatcagcatcgtccgagtctgtagcgggtgcaggcatgcgagcgtcaatgcaagctcagcgggaacaagtccaaagggccgcacctcggtcgtgacgcccggcttgccgagaaactcgagcagctcgatgagtaccttgtcctcgaaaaggctggccgtccaattaaagatctgccggctgcctggaaacgtgcttttgcctgcgagggctggaccgggctgggtcggccggggcggacgctcggattgcaagccgggcgtgacagtctcggtcgacgagcggtccttgtcgtgcatgagcttgcgactctttaaatcgagaggagacagaggcggctgaggagggctggttcctgggacgaggaggacggccgactgctcgatgggcgagtcgggcggagcctgggtgacctgctcgagtcgaagcaagagggaaggagtttaggtcagcgcctgctcagagcgacagacagtcgaggaacgcacttcatcctcggccggccgatgttgcttgactccgctcggcggtccccagaaaccaaaaggcatcgacgacggcggcgtcttgccgagaccgccctggacgttcgaggacgctccgaccgcttgcagcggcagcgtcttgcgctcgggccgaccggagagggtcggcatcgacggcggctgcatggctggcttgcctgcgttgggcgagttgccaaaggacgtgtcggtcgtcgaggagggcgagacgagcggaagcggaacgacctgggacagagcgcttggatgtcagcatcgcgttgcgtaaggccagacacgagtgaaggggggggctcacgtttggcgccttggcgccggcctgcgaacggatgtgtgcttgcgagcggaggatgtcgtggttgaggacggggacgatcgcaggcaagggcgatagcggagactgtcgttccgagaagccagagcgtcagcgggacgaacaagcacgcccgggtgacgatggacgcaccagaacggcaaagatgctcgggatcgtcccactcggcggcgtcataccatagccgatgccggtcggcaagggagagccctcgctgaccacggtcccctcgccatgcaccgcccggtcctcgttcacgcccgtcgagcttgagatgtgccgccgatggcctggcgagcgcgggaccgagggaaacctgattgggctgccgagcgtcccaaccgggaggggaggaggagatgaggcggcgtgctcggaggggaggctggccgtcgggagaggtcgaatgggggagaggacgggcgccgaacgaacggagcgtgcggggcctgcgagggaatcacgcaagggaaggacgtcagccggtgcgggattgagaacagaatgacagctgctaaaggaccgaccgttcctgtcgagcttcaagatcgactgcggccgacccacgcttagctccgagacggcgctctcgctctcgccgccgtcgcgcacggccccgagccagggcaggatcttgctcttgagcgccggtgactggagccgctcgagcccggcgatgcgcgagtgcggagcgtaggtcgggtcgttgaactcggtttcgtccgggtgggtgccgaggtcgggcgtcatcttgactggcagccacgggagcacgcgaggaggagggcaggtcagcgacggggatgggcgagcgagggcagacggggcagacctggttcggaagtgaggcgaagggaggctgcgcaggcaagacaaggacttcaaagtcggctcgagcaagttgagccgagaggcagccgtacctgagcaggtagacggcaagaggcactctggcttaggaagagggtggatgttgagcgacgggcgccccccaggagcccaggaaggagctggaagggttcagcagctccttccggactggcctgacgccatgcgagtcggccttgcttgcaggctccgcctttgaggttccggccgggtccgtcgctcaacaggggggctggctgaggtggggatcgacgtttagagagggacgggggggaaggtcgtgtccctcagcgaggtcgggacgagcactggctctggttgagcgttaccggctggtgggagcagcaggtgagcgtttatagcagctccgagctggtcgtcaggtcgtcagggatgcgagaggggtcgcagggaaggcaacgaggcggagcgcccggctgggacccgacttgccaaacgacccctctcccatgttggacgacccgaccgaagggtcagcgctttggccgcatacgagcatctcgaggtgctgatcagcacatactgtcgccatggtcgtccgccgtcgtgtcgcgaggtagaccggtcgcaactcgcgaggaggcctgcctggccagcgcgagcgatggaagaggggctgcttcgcgagccggcggagggttagacgtcgaggacctcgactgcctcggcccgtcgtccctgtcggttgacttgcccgccagccttcagactacgaggagcgcctcctggccaaggtatcagctcgaccgacctcgactgtagacgagcgtggcctcgccggtcgacccgccctgcttcgactgcgcctcgccgccgccgccgccagcgccaaagccgagtcgtctcgccgctgggtcgagctcctcccgacggatacccaatctttctccctcgcccttcacagaccccgccaacagctcagctcgcaaagatgggcgcgcctgacctctatctcgacccgcaaatcagggtgcgtccgcgtcgcgtgtctggcgaggtgtttgctctgtcgtcacgagtgggctgaccgctcctgtttccctcctgccagaactgggtcctcttccccatcaccttggtgtaagtcctcgtcctttgagtgcgctcgacagcgcctgtagcccagctgatcatctctcacgatcgctttccccagtatggtcgtccctggctgccctgaccgtccgaccggggagctcgtcgctgacccgcttacgcgcgccttcgttgcgatgggcaggtccttgtcggcatcctccggcacaacgtcacccagctgctcgacggcccacccaagaggcagtccaaagcggccgtccgcgagcagtacgtccgccaatcctgctcgctcaagctgtcgattggcagtgcgaatcggggtctgcctgggctgactctgacgcccgcgcgccgtgtgttctctcgcctgcctgcctgccttcctctcagacgcgcccttcagcggtcccggctactctcgacatcgtccccgtcctgccccctcccgccactcgccttccaagcactcgcctcgcacctctcgctcgccttccagaagggcgcctaccttaagctcaagccgacgtttgacgccgacggccagatgatcgagcccgagaaggcggcggcgccgaaccccttgagcgacccgaatgcgatggagggcatgatggacggcatgaagaagcaggtcgtcatgatggtgcccaactttgccatcatggcctgggtgcgtcgcgcgcgccggggtggcaagacctcagatgatgggctcggccgctgaccctttccatctacctgcagattaacttcttcttctctggcttcgtctgcagtgcgtcctgccctgctgagtcaacaggcgacgcgtctaacctctcataccctccctgcgctcagtcaagctgccgttcccgttgacgctcggcttcaagtcgatgctccagcgcgacattgtcacgcccgacatgggtccgtcgcctcacatatctcgctagaccatgatttgcaggctgacgcttctgctcgcctgtctagatgtccgctgggtgtctgccctctcgtggtactttctcaactggtttggcctcaacggcgtcttccgcctgctgctcaacgacccctcggccacccagctccagccgacgtcgacggccttcctcgcccagctcggaggcgccctcccgcccggctcgccgccgccgcagggcgactttccaaagttttttcgccaggaggaggagaacctccagatggcggtcgagggctaccgctatgcagccgaggggattgaaaccagcgtcgcccggcgctgggcgctttagcgaatgactgctatctaaagaggacttgtcttgaattaagagagcagcaggggtgcacttgtcggctcggaggcaagcccctccccgcgcgagtttttgcctcctcgctcgtctcgtctcgcacgcgctgttgggccgccggagcgcgccgcccggagggacgaatttgccttgggcggcgccggctctggattcgccccttcgcctctcacgctcgcctcctcccagacgcagcccacaccactcagtcttccttctctccttccttctctctgctcggctcttctttcctcgccagcagcagtctctttctctctcggccgcgcctctccctccgcaccacttctcaagcaggcatccacccgcccgcgcgcccacccgcctccgcagctccctccgttcctccttctctccctccctccctccccggcgccatgtctgccgactcgcccgtcatccccgagatcctcgtcgccctccagggcgccaaggacgccacccaggccaagggcaaggccgacgagctctcgctcgccatcaagcggtccgacattgaggccctttcgacccactctgtcctcgacacggtcgccgcttgggcgctctcaaagtcggagcaggagcgggccaacgccgccatcacctttggccggctgattgtcaacctcggtgccggaaccgaggccgtcttcctgccgtacctcgagagcatcttcaacctgctcaacgaaaagacggcggcgatccggacgtcggcccagtcggcgctgaacacgtttgtcaagatctgcccgcccgaggcgacccggctcgtctttgtcgtcctgcgggcctgcctcaagtcgctcggcggctggcgctcgcagattggcgtcctcaaggcgctcgagggcatggtcaaggagggcgcgaccgagaatgtcgccgccgagctcggcgctaccattccgctcgtcgagaaggccatgcacgacaccaaggccgaggtgcgtctccttgcaaattatctgtgccgggtcagccgattgacctcctccctctctctgctctccaggtcgccactgccgccaagaagacgggcctcgccctcaccggcacgctctacaaccccgacctcaagaagcaccttgacaagctcgtcgacgccatggcctcgcccggcgcggtcccctccaccatcaaggctctctcgtcgacgacgtttgtcgctgaggttaacgcccccgtcctcgctgtcatggtcccgctcctgatccgtgcgctcaaggagcgctcgaccgacacgacccgaatgacgtgcatcgtcatctccaacctcgtcaagctcgtccgggaccccaagattgccgcgacgtacctcggcgtcctcgtccccggtgtcgacaacattgccgagggcgccgccttccccgagatccgcgcgtttgccaagacggcccaggagacgctcaaggctgccggtgcctcggccgactcgaagccgccgccggcgcgcgacatccctgccgcgacgctcgccgcgctcgccatcattctcccgaacctcgccatcaccaacctgccccggccgccgatcgaggccctcccgctcgtcaagtcgatgccgaacgagccgatcgcggcgaccatcctcgagtttgccgccggcatcgccgccgacatgtccgaggagcgcctctttgacggcgacgtttgggagaaccgctcgctcggcccttacctccgctgggtcctgcccgacggcaaggctgctgtcaaggacgtcaccgccgccacgcttgcttcgtttattgaggacgacaaggtgcgcgcgtgtgcgcttcttgcccgctccaaagacgccggacgctgacctccgctttttctcgcctagaaccgctttgcgcccgacgaggtcgacgatggcaccgagggcgagctcctctgcaacattcaattttcgctcgcctacggtggcctgctccttcttaaccacaccaagctcaagctctaccgcggccaccgctacggtgtctgcgccggcaacggaaagggaaagtcgacgctcctcaaggcgatccgcgacggcaaggtcgagggcttcccgtcgcaggacgagctcaagactatcatggtcgagcacgccctccagggcgaggacactggctgctcgatcatcgactttatcgctggtggtgcgtccccttcgcgcgcgagcttccatgtttttcttgtggccggcttgctgacccccccgtgcgccttattcagacgtgaacctgatcgagaagaagacgacgcgcgagtcgatcgccgccgccctcctcgaggtcggcttctccgaggagaagcagcaggacgccgtcggctcgctctcgggtggctggaagatgaagctcgagctcgcccgtgcgatgctcgtcggtgccgacattctcctcctcgacgagccgaccaaccatctcggtcagtcacagccccccctctgtcagctggcggcgccgttgctgaccctccattccgccttggcagacgtcggctccgtcgcatggctcgagcgctacctgtgctcgcagacgcagattacgtgcatcatggtctcgcacgactctggcttcctcgacaacacgtgcaccgacattatgcactacgagaacaagaagattgcctactacaagggcaacctctccaagttcgtcgagcgcgttcccgaggccaagtcgtactacacgctcgccgcgacctcgatcgccttcaagttccccccgccgggctcgctcatgggcgtccggtccaacacgcggtcgatcatgaagctcaccaactgcacattcacctacccgggcgcgccccggccccagctccacgacgtctcgtgcgcgctcaccctctcgtcgcgcgtcggcatcctcggcccgaacggagccggaaagtcgacgctcatcaagctcctcacgggcgagacgatcccggactcgggcaaggtcgacaagcacccggcgctccgggtcggctacgtcgcccagcacgccttccaccacctcgagcagcacctcgagaagaccccggtcgcctacatgttcgtcgtcccgcgggtgccgctgctcctgcccttttgctgaccccggcctgctttcgacctcacagccagtggcgcttccaggacggccacgaccgcgagatcctcgagaaggcgacgcgcgtcctgtccgaggaggagaaggagctgatggacaagccgatcgtcggcaaggacggctcgacccgcaagctcgagctcatcctcggccggcagaagctcaagaagacgttccagtacgagatcaagtggcagggcctctcgcacaagtccaacacgtggatgtctcggaccgacctgctcgagctcggctttgcaaagatcatccagcagtttgacgacatcgagtcgtcgcgcgagggtgccggcacgcgcgacaacgctgcccacctcatcaagaagcacctcgaggacgtcggtctcgagggcgaccacgccatgtactcagagatgggcggcctttcgggtggccagaaggtcaaggtcgtcatcgcggccacgctctggaacaacccgcagggtgagtgtggcaggttgggccctccatcgccgaagcgctcctcgctgatccccccttttttgcccccctcacagtcctcgtcctcgacgagccgaccaacttcctcgaccgcgaggccctcggcggtctgtcggttgccatccgcgactggggaggagcggtctgcatcatctctcacaacatggagtttgttaacgcgctctgccccgagatttggcacgttgaggccggccggctgacggccaagggcaaggtcgcgcttgtcgaggacgcctttgcggacaagtctggcgcgacgactgccggtacgtcggcggccgtctcgcgcctggcgtcgcgcaacgcctcgcggacgggctcagccacgacgacgccagccggctcgggcgacgagggcgacacggcctcgccctcgggcggcatcaagaagaagcccaagaagctctcgcgcaaccagatcaaggagcagcaggcccggcgcgccaagcgcaagctggactggctttcgtacggcggagagcgggagccagacaccgacgatgagtaaagctcggcttcggctcggtccgctctactctggctcggtgcgcttcgctcatcaacgacgagtgaagctcggctcggctccggcttggtccgcttctgctgtatcctcttcccctcgcgcctctttccctcgcgccccttttcctcccaaaactggacgcttccctacagtccggccaccttacccgccataccctccctgtaatgcccgccctttttctccccttttccattctttctcgggtcccccctttcctttccttcctttctgctcgcagggctcttgtaggccccctctccccatagatctcgctccgcactgctgcctccgtctccatggcattcctctcatcacctgcgaggcgtgcagaaggtaccggcggagagtcggccgggcttgggcagactttggaatgtcaggctacgacgggcggcgccgtgcggaggagaggggttgctgggcccaatgcactcgccgtgtgcactcgccgcctggccggctgagcacctccggcgaccgacctcagagctgatagagagacgcttccacagtccgagtcgatcaaagagccctcagcttgcaggaagctttggctcgacaacccgactcgccgcttgccagggcaggtcaaaggagctgcgctcgacgcgacgacttcgacggcgggcggcctccgccgacgccttcgtcgctcctgcctctcgaccacgacccccttcgcacaccgcccgccatgcctctcggccctcacctggacctgccctacggtgctctgccgcgactcaagctcgacctctacctgccagaggcgaccgagcagtgccagggccttgtcgtctttgtccacggcggcgcctggcggacgtcgtcgtcgcgcgacccaacgctcgaagccctgccgacgctgatgccgcaagactatgcgctcgccgtcatcaactaccggctgagcggtcagacggaagaggagcccttccgctggccgggtcatccgctcgacgtcaaggcggcggtcgagtggctcgtcggcgagggcgcggccggcggcctgcttctcggcgaccactggcagcacgcacgcgacagggtctggttcgtcggccactcggccggggcggtacgtcaaggcgtctgaggagactccagcagggccttttaaactgactcctgcctcaccctacagcacatcatcgctcacttcctgctgcagcacccggacctgccgccattcgcgccagagctccgggtgacgttccgcggcttcctcttttcagaaccgatagcggacgtgcgtcggccgctgcgactgttgcgtctggtggttcagaggctgacctcttctccgccctcgcagatcgacgcactcgtcgacgagtatccgaaataccaggagtggttcatcaccgacgccttcggcccgccgccctacctctcggcttcgccggcgaatcccgactcgcgtgcgtctgcgactgctggacggcacagattacatcttttgtcctctaaagcatctgcgctgacatggtcatgcgctccaactcgcacccaagccttcacgctccctttgcgtcctcaccggcttcagctgcttgtgtcgcattcgccctccgatacgcttgtctcaatccggcagccgacgcttctccacgcacgactagtcagcctcggccttggcccagaaacagagctcctggtcgacctcgagctcggcgatcacgacgagctcctcaagtcgtcgctctttggcgagcgcgttcgtgcctgggtgcgggatccgccgcagatgctagtagcgacggcgacgtcgtagatcgatctcgcggcggctctacaccggcgcataggaccttcacttgttcatctagaggcgatccagacgtagcgcaggacgcacccggcgccactgcccgacggaggtcgctcggtccggccgacccgttcgcatggccattgaccgtcaactgtcgagcacaagagcagcacactgcatttcgttcttggagcggatcagcaggagccagaggaaggtcaagaagtagggcaaggcgccggcctgtagatagtctcctccagctgccttgcgagcagcaccttttgattctgtgaatagcctttgtcgaactggcgatgtacatagaggcactctctgctgagcctctttccggataaatcttacagcgccttttctggagcgaggaaggtcatcatcgagaggcaggtggtatcaagcacgggcgagacgggtggcgaggcgagtggtgtcgtcgtacgagccggccagtcggaagaactctgggtatccggcctgcaacaaaggcacccgctcgtcaacgtctgcattgggcgagcatgacatgtagcgcgactgaccataagctggctagactgctcggtcgaaagctcctccggggtgcactcggcgaggcgcgcctcatgtcacgcgtagcgctggagaaaagcgtttcagcttcttgccctgctcggacgagtcggagcaccgctgggtctcgcgaggggaagaggatacagcagaagcggaccaagccggagccgagccgagcttcactcgtcgttgatgagcgaagcgcaccgagccagagtagagcggaccgagccgaagccgagctttactcatcgtcggtgtctggctcccgctctccgccgtacgaaagccagtccagcttgcgcttggcgcgccgggcctgctgctccttgatctggttgcgcgagagcttcttgggcttcttcttgatgccgcccgagggcgaggccgtgtcgccctcgtcgcccgagccggctggcgtcgtcgtggctgagcccgtccgcgaggcgttgcgcgacgccaggcgcgagacggccgccgacgtaccggcagtcgtcgcgccagacttgtccgcaaaggcgtcctcgacaagcgcgaccttgcccttggccggcaaccggccgccgactgagaagtctggggtgcgaaggaccgccggagaatgtgcctctgagacgcgttgaaggcgaaagaggttgaccggccgaagcgtggagggagaaactccgacaccagcgtagggacgtcgcaacgcgacatcaccgcaacgcagatgtaggagaggcaattgtgtgggctgcggctggccgttcttaaaagcttgaatagcagatccacatcgcccgaaggcttggtgttcttggtgagagtatgctttttcctcattgcccacacactgcagaggaggggtggtgaaggtggcaaggggtggagaggaggggaggcaggaagaagagagggaaggccaaggtcaaatggcccgtgtaggcggcttgacacagggcggaagtacatgaggagtctgggcaacaagaacggaaggcagggtcagtaagagctcgggcaggggtctcagaaggcaatgagggttggtaggtagatcagaagcgaggctttggcggcactctagtcggatcgtcaaagcgtgagggttgaattcaggctcgttacgactggggcgacatgggttcatcacgtcgaggtgggtcgaggaagaccagagggaagggagggggtggtcggagggaggagaggtcggaggcgcagcgcggaggacgaggcaggaaaagactcactagtagagaaggtcagtagagcggcccagaggacaggcaccctcccctcttcaatcccagcttgaggctgggagccagcaaagggaggcgatggtcagcgtcgaggttggagggagtggctggattttgggcggctcgcgctctctcccgaaaagagtttcaaactccgccagcccctttttgacccgtcggcggcgcgcccggagtccgccggatgctggccggtcaggcgtcgtcgtcgagcgagaatattttcgaggtgcgatgctgactgcggagaggagggcaataagagacggtacgaggcatcagatcgggttgagggcgcgagcagagatatgtacgggctggaggcgagagaggaaggtcgtcgcaaaaggcgacgcacgaagagtctgcgcgcgttgggcgccgaagcagaagggatgaagggagaagaagacgagggagggtgaggatgggtgactggcggagccggagcccgagccaggacgagggggcgcacgtttcatcgccgcccgccgtcttcgcctcgcaccctctccgactcagcgctttttcagcgccgagtgtcgatctccgcgccaggcgatgtgcgaccttcgcccagacgtctcgtcgctcccgaaagacgagccggcccctgatgaggaggcgctcgtcttcgagagagatcgaggggttgaggtgtgtggttgacgtagttctgcggtccgctgccaggctctagagccttgccgaggatcgtcaggacgctcgattcaagtgaggctggcaaagaaagatgaggcagagtcagccccgtgattcgcaagaggacgcagccaggagctcgcctagacgcacaggaccttcatgtcgaggtcgacgacggccgacttccagtcagcccactcctcgccccggtcgagcctggtccagacggcgcggacgagcttctcagccgagtcgacgttgaagcagcactgggtgcggaggccgtcaaagagcgaggtgatccacggccgggcggccatgtcgacctgggtcgagccgatgagcattggccagatgaggctggaaagagggcgagagtcagcctccgggtgcgcggatgtcgcacccagcgcgaggggcactcactgggtcggacggatgacgttgatggccgacgagcacgactcaaggacggcaagggaggccgcctggacgcgaatgtcggtccggctgacgtggaagatgtgccggtagacgagaacctcgacggcccgaaggtaggcctcggagccgtccttgatccgcccggtgccgagcgcacgggcgttaccgagctcgcgctcgacgtcgcgcaggagctggccgacgtccttcgagatgcggaggacgtcaggctcgttgcccccgccgccggcagcggcggtgccggtggtcggagtcgagcagccgctgaggccggtgacgtcgcggaggaaggcgagcgacagaccgtcctcgtgtaagaggcagtcggcagcgacagcggtggcggccgagacctcggggatggcgcccgacgcctgcgaggcgcggatcatgagcgagttggcctgcgagcgaggactgtgtcagcggaggcatccgagagggcacacaacagtagacgcacccgagcgacgagcgagaggacggcgcgggtcgtgccaaagtggttttcgaccgactcgcggtggtacgagatctggccggtcgcgctccaccatgtgccttcgttgacgagcttggcctcggacccattgacgagcccggcaaagacctcgtgacctgcgaggatctcgagcaggagccggaccgggtcgaccgaccgccccgtctcgtcaaagacaatggccccggcttggcgctgctggagcaggacgtcgggtccgccgcaggcccggacgagcgcgagtccggcgtcgaggttcttggagaagccgtaaccgccgagcatgacgtcgacgactgagcccatgacggcgcccgcgagccggacaaggatatcctccgccgccgagccgccctggagctcattctctgcagcgtcggccgcagcgaggagggcgcgcgcttcagcccggaagccgacggcgaggtcgagtgcgcggccgacagtgtcctgcggcgcgcgggccttggcgagcaggtacgcctggtgggtcgctgcgatcgttaggagcgtcgtccggagaccgtcgacggcggcgtttgacccgcgcgggcgcgagagcgagagcgggaggagcactgccagcaaaggcgaggcggtcggagggttggccactgagcgatccagagagggagggtgtcagcgagtgggcagacgactcgagcagaggcaagacggacggactcagaagagcgcccgagttctggcagaagtggaggatgagcccccgggcctcggccgtcgggaaccaaggcaggagccattggtcggtcccgccaaagacgctgccgaccatcgctggcggcattggctgttgctgctgctgcggcggcgacgttccgttgctcatcgggctgacatcgccgtcgatgtccattgcctgggcacgctcgacggcggcggggtggagagcggctgaaggagccttggcgaccaccgactcgccgtccgagggcgaagggcagggcgagagggccgacgagcagacggacgacggcgagcggtgcttgtgcgcggccaagttggccttctgaggctgattgactggagcgctgacggcggcagcagcggcggctgcggcggcgatgataactccaggagcaggtgaggccgaagagctggtcgggggcgagactgactgggtccgctcgggctggtgctcctggatgtcggcagcggcgaaagcggcagcagcggcagcgaccgaggtgcgcttaacctcactatggggacgagtagcgggtcagcaccaggaagcgatcgagcggcaagagagagtccatcgacgcacgtcttcttctctccggccgccgtaccggctccgcgctcgctccgcttgctcccccctccgacgctgccagcgacgctacccttcttgcgtgcgccgacgacggtgcccgaaggcaaggtgacctcgccaccgggcagcttgcgcgtcgacgccgggttctcggccgaaggccagatgcactcgcgtccggcgttgcggcagcgcttgcagtcgggcttcctgcagatcgaaagtcaggtgagggtgtcagcaagccggccggcgacggcaagaaagaggcgcgacggaaggggcaacgcacgtctcgcagcagcggacgcgacgctgccggcagcagaggcagcccgtcttggtccgcttgtagcgctgcggcacgccgccgtcgctcccgccgccgaccgacgacgcggccttcttgtacgtgacggccgcaggcatggcagcgacgaccgagccagcattcgccggaggcgcgatcgagaaggactggtggcgctgcccttggggctgggagagtgtggccgagaggacgctggcggcgtcgtactgcgtgtcgttgccgtccgatgagttgtaggacgacccgccgtgcgagtagacgctcgaatcggcccgaccacgagcgctgctgcgatggacactgaccggtgcagggacgggcgggaggagaccgccgacgagcgacgaaacgaccgatccgccgccgaggagacccggcgagatgaactggggcgctccggcggcggccgagccgaccgaggccggaccgcctgcggggtggtaggccgaagggtaggtgacgttggccgtctgctgcgagagcgggaaggtcggaagcgtaaaggccgaggggtcggcgagcgtaaagtcgtcgttgaacgtgctacgtgcgagaggagagaggttgtccgcagggacgaggccggcgggaaaggggggtcagccggcgggtcgacactgagcccaatcgcctggccctctgagcagcgtaaacgctcccttgacacgaggacagcctgatctgccgcctctccacacgagcaacgtagacctctgagattgacaaaggacgtactcgaacagggcatcgtcccagttgatgccgccggccaggggcttggccgagctgccgccgccgccgccgccgaggttgttgacgaggtcctcgagctcgtcgtttgtcatctggctcaggtcgagcggcgtgcttggagtgaaggaggccattacgtctgctggctttggggatgggacgatgctggtcgagagaaagagaggcggcggaagacgagtcaacccacgcgggcgtgccggccaaggtgacagaagcgaggaccgggccgactgcgcaaaaggctctcgaagaaggcgtgcccccgtcaagactgagagctctcgcacggaacgccttgtagcggggagggagatgcgagcaactcttctacgagtgaggagcgtgcgctgcagactttgtagagaggctggggacgttggaggggccggccggccgttgtcttcgaccagcatgctggccggccctccgcaggcgtcggctccgacgtgcgtttcgccaatcagctcgtcttcagctatctgcgtcgcttccttgctacgagctcacactactactcgtcgcatcacgagccggcaccatcgacgctacgttgctgagatcggcagggccaccctctcaaacgggatcgaagggagcggagactggccgcaggtcgttcgggcctggccggctttgcgggcggctcggcgctttcggcggcccagcaagggacgacagcgaggcagccagcagcacctggtccttgcaagctccttacagcgacagcgcacgcggagcgacactctttcctgtgagtctcctagcttctcctcgctgtgcccactactgctcgcgacgatggaggggacagtctgcctgcaccctctcgcaccggcccggccggatgacggcggtcctcggcgagccgggccgggtcatcagtcgccccgccctcggccttgtccacgtcggtcgaccatgctggccaaatgcactggcaatcaggcaacagcggatcacccttgccccacactcccctctcctcttgctcctttgccaacgccagccagccagcagtagtgacacctctctcgcagcaccgcacaaagcccagaagcgatcgcccaaccttcccttcagcccaacccctcctccctcctccttccgaccgcccggacctgcctgccccttgtcgccctttgtcctatcccggatccattgtcgcttactccggcccaaccttctctccgcatcgccctccgccctcgtctgctcgtcgcagccggtcaacaccgctctctacctctcggccgccgcttctcgccgacccgctcgcccgcccatcgcttcgctcctcacgcctcagccagccttgacctcctaagcgcttctcgccggcatgttcaagcgcgcctccttccgccgagggtcgtcctcgagcggtccgcccgtccaggaggacgcccaggcctcgtcctcggccgcggcccagcagcagcagcagcagcaggcgtcgacctcgagctcgagcacgggctcgcttctcagccggttcaagtcggcgccaaaggtccctccggcgagtcggccaacggcgacgactgccggcgtctcgccctcgcggcccccgtctcggtcgacgggcccgccgccatcgacccgagggacctcgccctcgcccgcagcctcgtccggcgcgccacccttgccgttggtagatgaacccgtctacgcgtctggcggcggtagcggaaccggaccgggccggcgctcgcgcgcaaacacgctccctacgatggtcgagagcggcttcagccggccggtcagcatcagttcgagccggtcgagcttcacgagcgtctcgagcatcgctgctgatgacgacggccaggacggcaggggccggccggccgtcaacggcaagaacagccgaggaaagcctggcgccggcggcgtctgggccgaggaggaggaggagggccgccggccactcgttgagcttgcgagcgacgacgacaacgacgaccgacaccttcatgacgaggagaaggaccgcgtcggcgagggctgggctggctcacgcttggcagtggccggtgcaggctcgtccgcccttgcgacaccgctcgcatctgccccggcggccgcctcgaccaacggccacccgcagcagcagcagctgtcaaacggcgtcatcgagaacggccagcacgacattttcatccctggtctcgatgatgggcaccatggcttgtcggccgcgtcgtcgcagccattagtcagtggccagcgtccgcttccgccgacagacggcatcccctcacggccggcactcgcctcgtccatgtcggaacaaccggccatccgtcactctccgacgaccaacggcaccagtttcgcagcatcagcaagtccggctcctcccgcaagcagcaagccaccgcacacgcaccatcacgctcaccaccacacgccctccactgcgcacgcccactcgccgccggtcgcctcgccgccgccgatccgggcggcgacgctctcgggcctcaaggacgtcgcttcgatcgcggccgcctcgctccatgcgaaagaggctgccgcccagcaggcgttggcggccaacggcggaaagaagaagaagatcggcggcagcttcatgtcgaacttttcaaagaagctgcgcgacgtgcgtcaagagatcatgccgccccttcctggccgacagctgacttgttccctgttttccggcccagccgagcatggaaggcgccatggcgctcgcctccctcccaccgaccatccagccggccgaggagctgacgccgtatgcccggatggagcgcgccaagcaggccgagagggcacaccttctccagatctgcatggagctcggcgtcgagatttacgacgtgcgtaccaccttctgctttctcgtgcgcgctcgactgatcatctggagcccatcacccccgcagattgccccggacggccactgcatgtacgccgccgttgccgaccagctgcacattctcaaggtccttaaggaggaagacgtctgtccccgctgcctctctcactctccgtttgccctcgctcaccctgcaccttcgcctccatccacagaataaccctcggacgacacgcgctgcagcggccgactacatgctcgcccacccagacgccttcctgccgttcctcgtcggctcggccgagctcgagtttggcgaggatgatgaaggcgccgttgagggcgagtcggaggccgagcggttcgaacgccggcgggccgtcgaggatggtgcgtgcgcttgaaagccagttgactctaggtcttcaacactggactgacgcgtctcgttccctgtgagccagccatgatgaccgagcgagccttcaagcgctactgcgaccgtgtgcgcgactctggcgagtggggcggcgagcccgaggttagtccgctccgatgccctctcttgcgcgccgtccgctgatatctcgcttcgctctgcctgcagatcctcgcgctctcgcgctactaccagatgcccattcacgtcatccagtcgaaccacccaaagattgtcgtccactcgcccgacccaaaggcaaagtcgacgctcgaccccaagagcgcccgcaagatcaaggccgtccggattagttatcaccggaggctctacggccttggcgagcactacgtcggtccttcagtttctcgcagcccttgcgctccgacttgccggctgacctgagcacttcgccctgccgctccgccagaactcgctccgcaagataacctacacgctcagcgccttctcggccatggtgtacgtccgcttctcgctcagtgaccctctccgctctgacatcgtctgacatgcctcgcaccttacccctctgcaggccgatgtgagcgctgcccccactcttagacgcggacctgctgccctgcctcctttagactcgtctggactctccggctggcgtcctaatctaccgacccccatcgtttcgcttccctccgctgctcccttcgtcttctctctctctgtacttttcttttgtagaactcgttcgcagacctttcctccttgttccgctcgcgagtctctgctcaattccggtcgcaattacgtgcctgtttgcccgccttgcccagatctgagcacccatctgatcgtgacccatgcagacggatgtccttccttgtttcgcgacgagcgctagaaagggagagcgccgtccggccgcgcagcaagccgctgccttcgctgacctcatccgttgacagaccattccctctcgacattcacctcccactctcgctcctgacgaccctaccatgccgcggacagacatcgaaaagagggccacctctggcctccactccggctcgcacgcctcgaacctcaccgcggcaaacgaagcctggccagcgacggccgcccttgccgacctctagagcgcgcctcgcatcaactacgacccggccgcgctcgcgcgtgctatcggccgctgcatcgtggacaacccaggcctcaatccagtgtgccacgtctggccgccttttggaccggccgtggtggcagggtcgggtgcgacggccggcgcgtacgtctagggttcgacgcgtcgactcgagttaccggctgacaagagtcgtcctcgctgccttcgtcgcagcaccaccaacagtcctgagagcctcactcgtgagtgactcgttggctgaagagaccactgtcgctcgcgactcaccattgactttcattttgatttgcatagccggccgcgcactcggcgaacaaggccgacccagtggccgcgctcaacacacccggccagtcagccgttcaccagtcgagcaaggagcgttcctgatgctcctaaagtccttcgttcattgacggctcctatcgccacgacgaagcgagcctgctggaggaactacgtgtgctcgagcatcgtttgcaccttttccagcgcgcacatcgcgaaacagccgccactctgagaaatcgcgtcgaaatagagcggcacgccagcctccgctcgctccatcaagctcggctttcgtgcggcgcatacgcgatgtcagctcggacaggtgggcgatccggccgaggcgaccatcatgtggtggacgcagctccggggatgtcaaactctggcggcccttgaagcgaccgccgtcaaggctctcatcctctgacgtgtgcctgcaagccggccgaccggtccctcgcacggtcctgccccgctctgaccgctcttctaagcgtcgagagttgaagccggcgggccgactgcgcgtcgatgacgcggagggccaagctcactctgcgtgtggcggcgctgccggtcgactttccctcccagtccttgccagggacgactgttcgactgcatcctccctctgtccttccgcttcaccttcatcttttgctcttcctgatgtcgcagcagcagctcgcaccgccgctcgacctgagcacgctcccgcccgcgctgcacgagccgacgagggattcgcctgagcgcgacatcctgcacgaccagcacgcgccatctcccctcccgccgcaccctcacgccgccgtcggctcgcgcgaccccgagattgacctctttggcaaccagagcttgcctgagccggctggtccatttaagcctcctgcggccgccgccgctcacacgagtgtcaagccggccgtcgctgtcctgaccgaggcccgtctcgacccagaggtcaaggacggcaagctcgacctgcccgccccggccggccctgcgccaccgcctcatgctcctgcgcctgttgccttgcccagatcggacgacccagaggtcaaggacggccggcagaatttgcccgagcccgctggcccgcccgcgccagattcggctgcagtcgctccggccgtcatcgataacgctgctgccgctgacccagaggtgactgcgtcgggcacgctcaacctgcccgagcctgctggacccgaccagcctcattcggttgagtccaaggtgccgttcgaccacccgggttcgacgaacgcaacccaggtcaacgaggagggccaggcgacgaagaagcacgcgccgcaggacaagattgcgtcgctgccgtcggcagcagagatcccgacccacccggccggtggcaaggtcgtcccgcattcgctcgaggtcattgagggcctccagacaaagtcgtcggacctgccgccgttcatccagcgggccgaggaggccgtcatctcgctcctcccggtcgacctgccgtccgacctcaacctcgaggccgcgcccccgccagcttacgtgcttagcgacggccacaaggaacccaagcttgccggcgcgcacaatgacgtccctggcaagacgcatgagcaggttgacattgtcggcaagcacgaggaggcggccgaggtcgagaagcgcaaggcgctccggcgcgatgtcctcggccacgaggccggcgggaccatcgtccttggtatcgaggacgatcacctctggacgatgctccgacggctcgacaaggtccgtccgcccatagctgtactcctgatcgagcgcgtgctgacttggttgccccttcctcaacgacctgcagcaagttacgcacgtcctctcgccgccctcgaagctcaagcccggccagcccgacctgcgccggtcgcggcttccgaccgtgccgtacaactctgacctgatccgggccaacctcgagcgatgttacgcgacggctggcgtcggcggcatccgcttcacgcgcgagctcggccggctcgtctcgtggcacccgaacgagcgcgtccgggccggcatctttgcggcaacctactttttcgcctgggttttccacatgacaacgccgctccttatcggcgtcatgatgctcctcatcctctcgcgccggagccggggcgtcctcttcccggtcgtcccgcccccgccgggcgtgacaccgtcggcgaccgacccgctcaatcgcaagggcgacgagagtatggtctcgacccggcacccgcagaaggtccggagcaagcacgagcagatcgaggagcagtcgtgggagtttacgaagaacatcgaaaaggtgcgctgccccatcagttctgtcctccgctgtcatgtactcaccgccacgcttccttgcagtttggcatgcgcgtcctcatgggcggtcggcacaagccgtcgaacaagcagctcaagaaggcagcggttgaggcgggcgaggacccggaccacgtcacgaacgggaccggccatgccgatgtcgaggcaaagacggcaccggcgactggcgtcgagcacggcagcaagcgcaacaagacggtccgtttcgctcgctccgttgtgacgacagcagagttgctcagtgctgacttgatccgctgatcgcagctgaacgagggcggcaagctcgaggaggccaacgcggacgacgcgcgcaaggcaaaggaggagcgcgatcagatggtcggcatcgtcgccaagggcctccaggacgccctccacgactttgcagacctctgggagatgatggccaagtacgttttggcctggccttgtcgactctagtttctcgatgctgacccctcttgacgcctcacccaccaccagcgctctcaacccgcccgcctactacccgcccggctttgcccggctcaagctcgccgccgtcctgctcccagtcgccatcatctttgccattacgccgcccgccgtctttgcccacgccggctcgtttgcgctcggcgccggcttctttggcgccaagttcattatgcaaggcgtccagtggctgctcaagacgttcccgaactggcccgagcagctcgacctcagcaactcgctcctcctcggcgtcccgaccgacgctcagctcgcgctcgtgagtctcacgcgccgatctcaaggcttgagcgccgggcatccttgctgacagtaatcctctgccgcccgttcctagtacatgctccgtcagcgcgagttccaccgcaacccgctccccaggccgccgtagtacgtccctcgctccgataaggccctctcgactcgatacgcagctgacctgacttgacgcctgcagcaacccctcgtccaaggcggcgcaggagcagctgaacgacacttcggtcctcgacgacgcgcatgaggaagacaccgtctcctcggtcggctcgggctactcgacccacctcgtcggcgacggcgagcatcacgaggacggcaaggccaagaacaagattctcagctggggccagaagctcagcggcaaggcggcgaccctccgcgcgcacggcaaggtgacggttctgcccgagggcccgcctcaaaagcaggtgcgttcgtcgagggtcttgttggcgatccgatgctctgctgacccttctcccaacctcttccgaccgccgcaggagaaggagaagattggcatgggcaagcgcgtgacacgctacttgctcgaccgcaaggagctaaaagacggcggcgagatctggggtgcgttccgactgccccgactcggacacaaagccgttcgctgaccgttgttttgccttgcagagtaccctgccaagctcaatggcaagctcggctcgctcatcctcgacgtccccgacgaggacgagggctcgacgtttgactcgcagctgctctttgtcccggacggcgcgaaggatgcgaccgagtcgatccacgtcaacaatgtggtcgaactcaagaagggcggcgtcggcctcccgcggtcggtcctcggctgggcggccggcatggacctcgccggcaacgggctcgagatccgcgtcaaggacgccggtggcatccaggagggcaaggagatcagcaagggcgtctgggtcaacaacgttgtgtttgaggacgagggcgaccaggagaagactggccgggtcattcagtttgagcgcgtcggaaggcgcgacgccctctttgtccgcttgctgtccatctcggaggccctatgggagacgctctgagcggttcgcgcacctcgattctgcccctttatgtagctctagccagaccgcccctgaaccttctgtcgatatacgcgcttcccgactcgatcggtcgcctgcatcagaggtcagtcagcagcatggcgaacccactcttcagtcggcccatcccgtgccgatctgcaacgtaggctgaacgccgggcgggtcagtgtcgacgtcgcgaggtcgtcgagcgggacgcgagcagttgcgacggccgatgcgcgcagcgcttttctgaggggtcgcgccgtgaggccggacgacgggccaacccatccgtgccaggtgtcagttcgtagacagcggcgtctgccctttgctccacacacggcttgagggcgatgctgttgacgggaaggccggggggaggtggaggcaactcgcgtgtccgtccctcccccttccttgcttcccccctcctcccctttgggtgtttgatattcttgcgctggctgacacgcgcggtgtggcttctctgtttctctcagagcacggctgctgggcacggcgacaagtaagctcgacgacttgacggctaggctcggtgcggtccgtgtttgaccggatccgcggaagggacagcaagcggctttgccgagagggctggaaaggggaaagtgggcgccgatcgcatgttgtcctctccttcctctttggtcgctgacgctcaggcagctggggtgcgtcgccgagcccagcaggtgacggcaaggcgctgccccggggcctgagcgatgcagtcctgtctcctgaagagagcgtcacgcaaaaagacccatgagagagagagggagacaaaaacgaaggagagaggacaagatctcgaaagaaggtgacaagataagagatggacggaatgacgagatgacaacgagtgactagatgggagcttgcggaaaggattaagcgtcggccgtgagacctgagttacttgaatgaagtgcgggcgaagggggtctgggaagagagcagcgcaagagtcagcaagtgcgtccaacaagcgagcgagcccgcggtagaggagaggcgctcaccctgactctgggtcatgaccggccgcggcgctcgccctagttctcgcggcgcttggggttgtactggcgcgacttgacgagcttctcgagcggcgagagctcgcgccggttgacgatgacgtccacgatcggcggcggcgccgtttcgtcgaattcagcgcactgcgtcaatggggcgcaagcagcatcgttgttcgagattgttggcagatttccgctggtgagcaggagcatctctcgcgagtaggtgcagaagacttggctgagaatgacgaccccggtcaacattggcgttcatcagctggcagcacagcgtgctcagtgcagaagatgcgactcgcgtagtgtcctcagtgccgggcacgttgtagatgcaggtaggctcctcgttgccctcggggataggagcggagggggtcgtgacggtaaggccgttcgccaccgcaccgaacgcattcggtccgttggtcccggccacggccacggggcaggtgatgctccggcagacactgggagccggggggccgggcaggacagacgggacgtcttggcgtcgaatgtactcgtacgtgccggtcgggctgcgacggagctcggccgcggcgagcggggcgagggcgagcgagccgacgagggcgacgagcgagagggtggtgggcgtggtggcgaaaagcatggcggcggggtgaagaagagggagcggctgggagagggagaggaattggccgagccaaaacaacgagggtcgccgacgtcggctcggcagcgcgtcgaaaactaaaactcaaaaactctcaaccgaccgaccaccctcgaagcgtctaatcaagaggaaggcgtgaggcacacgagtcgtcagcggcggtgccggtgggcaatgcgatagatgagcatgccaagcgactgtgtcgaggggcccgtcaggtcaggagaatgggccgagctgcgggacgaccgaaggaatcgatccgacgcgaccgtcaacaagcaccggccccgacgcggatccgcttcgaaggctgcgtgcctggctgcctactctgaagtcatccaggtgcagccagctagcgtcgattgcggtccctcgtctccccttccgtcgaacgcagcagttggcgcagccgatggctggggacagttcagaagcaaaggtcattacaatgcgttatatatacggtagttcgcgtcgccgccttcacgcacgaatcatcgtcgattggagtagtaatcaagtggttaagatgcttccctgctattcctttagcatctcaggaagtgccctctgggcgcgcaggttcgaatcctgtctacttcgtaaacgtcagaccttttgttttgagcctcgcttgttcatttgcctatctgtaaacgcagacagcaggagagcgtccatcccatatgcggcagccgcccatcgtgcggcgatcatctctgctaccaatttccacccgcaagagacgtcaactggacgtcccggcttcagtcacatcaaggccgcccctctagtcgccatcatttctcgaccgcaggcctcgcgctctcgacgagaaggactcatgcgggcagggccattaatcagaaggggggcaggcagctgctggacgattcgagtaatgttgatcaacggcgccgacggtcagcctgcgggacgacagaggatgaatgcctcgttccgatcggacgcacgaagagtgacgtgatacagtgcttgagagggagtttcgtgcgacgagaggggcggcgtggcggctgctggtgtaaggggtatctcgagcagtctgaccagacagagtgcaagttcagcacgcggcgagtcgcgatgaccgaaagttgacgacggcgatgaacgcacgagggttgcgagtacaagtaggaggcgaagagggacgcctggcagcaccggcggaacggatcatctaggctggctcttggctgcgacgtccccggggacaattggaaggcgagagctttactcggacgagcccgtcgcgggcgggccgctccaggttagaatccggatcgctgcgtccgctccggccgtcaccaggagccgctccttggcatgaagggcgacggcgagggcgccagagtcgcgattctgccggtggagcgacagctcttggaccgagagctcggatgccaggtcccagacgcgcagcgacccatcgtggccaaccgaggcgagcaagtcgggcaagacagccgagagggcaagcgcgcagacgccgtccgtgtgggccggcagagttgccatcgacttgcctgtcgacgggtgaaagggcgtacgggccagacatgtcagcgggggttgcaacgctcagcgattcggagacggcggtacggaccggtcgtaacgtccgtcaggcggatatgcttgtcctcgtgcgccgaaaacaggatcgggcgcgacgggtgcgaggcaatcttgttgatctgggtcgatgtcgtgccgtctgtgcacgaggttgggccagggggtcagcacgcgcaccaaggcacggacaacgagccttgaaactagaggagcctcaccgtacgaggcatcggtctccagctgccggacctccttgccagagctagcgtcaaacagcttgacgacgctgtttgtgtacgagacggcgacgagcgacgggtccataccgacggggcagaccgacgtcggcgccggcttagcctcgtccgacgatgcaccggcgccgccgtccttctcgagcccgtcataaccccaagtgagcagcagcggcgtcgagggcttctcggcatcccagaccttgaccgtcccgtcggccgaggccgagaccagcatccgctgtccctcggaacccacgatggtaaggccccagacgccatccgtgtggccgacaagcacgccgaggctcagcgaggcatcgtgcgacgagaagagcgagtggtcagctgcggctggcaccttccaggcgcggacggtcgcgtcaagcgagcccgagtagacgacttcccgtgacgggtggaaaagtacgcaggtgacggcgcccgagtgaccgcggaaggtgagctgaggctcctgctcgacctgcgtcgacctgaagcagtgagacggcgagcgggcgggcggaccggtcagcagtctgtttccgcaagtctcgcaagtccgacgtacttgtcagatgtcagctcttcgaggtcgacccgccagagcttgacggtgcagtcctccgaggcgctggcgatgcagaggtcttccgggtggcacgcgacatctcggattgagtcgacgtggctgagcgggcggcagaggacgagagagggtgagcgatgaaaggcagcgcaaagctctgacgacacgagccgcaccttttcagagtccggcgcggcttccacgagcccgcgtcgctcgtcgtgctttcggacgcgcgtgcgacctcgcgagtgtcgacgtcgtcgtcgtcggtgccggcagcgctgtcgtcgagcgttaggttggccagctcatcctcggcgctgcgactggcggccacaggcgccgcattctgggactgtgagtgaaacatctaggtcagtaggcagtcgcgccggggaggacccattcagagcgagagagatgcacaggtaggctgctaccggccttgctcagcgcatcccgccactgagtcttgtccggcggtcgaaacatggccgtcaggtggctctcctcctcgtcggcgaccgcctctgaccgctcctcgggcgcggccgtctcatctgctgccaccagcgctccgatgtcgccgtcgctgccgttagcagctgcagtgctgggcatgaaagtcgcgtccgacgagaggtcggcgttgtcgtcctcagcgacggcattctcgttgtcgtcctcaacgaggtcggcctggacctgctcgtcggtgacgtcgatcgcagcctcgagcgcggcgtcgtccggcacagcttgctgtgaggcctcgttaatcgtcgccgtcgactcgtccatcgaagggtcgtcgtctgctgtcgggatggcccgtgcctctgtgtcggtccggatttcctcctcggtcatctcgggcgctttggccttgaggtgctcgagccgctcctggtcggcgcgcgcggcggcgtccttggcttcggcttcgcgccgggaggcagcatcgcgtgccttggcctcctcgtcctcgtgctgctgatcgagcgattcctgaagcgaggttgggatgccctggacgggcgacggcggcgggtcgtccgagagggcctttctcggccggacgaggacggtcggctgagcaggttcgggtgcggcggcagccggagagggcgccgctactgatgaggccgtcaaggcctgagcgtatgtcgagcgctcggtaggcgccgccggcgtaggcgagacagaggccgacgaagcagcggctggggcaggcggcggcaagacgatgggccgacttggcagggggtttagggcgccgggcgaggtcaggtacgagacctcctggaggcactgcttcagatagtctcggctgcgctgccggcttttggggtcgcgaccggccgcagcgacgcccgtcttccaattggggacagggccggtgccgttggtcgcggagggggcaacggagctcgcgcgagtggcggcctccttgacgcccggcggcggggaggacgacgcccggacgccattcggcagggctgagagggagcgtgaaaaggaagggtcagtgctgtagatcgatggccgaaacgtggggctgcaaagttgcgcaccgccgtcatcgctgccgccctcgctgctcgcgctgccatctttgccctcagtgccctcggcctgcatcagcgagagcttgcccggagggattgccgacgacttggaacccggagcgggctgcttctcgcttgctttcgacctgagagacggccagatgcaagggcaatcagccgacgagctcgactgtgaacaaaggaacggcgcagacgaaccgctcctgccgcagcgcaaactcgagcagcttgacccttcgcgagagatccgtcttgaggttgtcggccgaccgccgctcgccttcaagaagggcgatccgggccttcagtcgagacggagttggggcgaaagggaaggttagcctggtgctcctcgttcagcgaggaagccggtagtcctggtccaagccgtcgttggcgagcagcagacgacttgacgtcgcccgtaccgctctggtcgctcgggagagacgacccgagcgtcgatgagaggcatgggtctcgaaggcgctgtgaccaggcggacggaggaggctcgctccatccttgggcctctgacgtcggcgagcggcctggccgtcatctcgaccgccatgcccagagccagccataggctgggagctcctggcagacctcgagacgcctctcacgcttctgaagcgcagtctgtgtgtgctatgggctctcggagcgaagcgatttgagccggttccgaaaagcaagggacgcaccctcatctcggcccgctcaatctcccactcgttgcggtcgcgctcccaccggcgccactcggtctgtaggtaatgcaggacgccggcgagcgacatctggggctcgccagactggacgccgtttgcgccagccagctggggagcgccaggctgctgctgctgttgctgctgctgctggagcggcggcggctggtgagggtggccgccctgctgctgctgggtcgggtgcccctggttctgggactgcatcgcgacgtgcttgctcgggagcagaaggagggagcaggccacgggcgacgagggagagggaagagaggggagagagggtgggggagagagggaaggcaggcctcgagattgaggggcaggaggagtgaggaggaggaggcaggctggctggctgcttggaaggggacggcggacgaccaacgcagggcgctcgagccggctcaggcactcagcgacgcagccttcctcgacgctcccctacccagtccctccagtccctggcaatctaaagaagctcgcatgcaatccagaagggtcttctgtgaattgagtaagaaaaggaagagcgggcgaggtgaggatgccgacggcggcagcgcaaaaggaaatgtctgacgtttacgaagtagacaggattcgaacctgcgcgcccagagggcacttcctgagatgctaaaggaatagcagggaagcatcttaaccacttgattactactccaatcgacgatgattcgtgcgtgaaggcggcgacgcgaactaccgtatatataacgcattgtaatgacctttgcttctgaactgtccccagccatcggctgcgccaactgctgcgttcgacggaaggggagacgagggaccgcaatcgacgctagctggctgcacctggacgagcttagcgtaggcagccaggtagacgtcgggcacggtcgcgtggacgcgcgactgtgctgccttgttcctaacttctcacgacgctcaatcccaccttttgcttgcccgtcagaagcacatgacagtcgctcggcctgcttgtgctcgcatctttgatcgctgcgattcacatgatccagaccgtttgagtacccgcgctgcgtgacctccttcatcgttcgacagctttgctcctctcgtctcgcgacaactttcgttccagccacccggcccgtgaaggcgagctcggcgtaggatgcagcgaggtccattatgatccagtcaaaacagggcccctccactatctttagacgaccggccgatcctggccggtctccatcgtcgcccgacgctccttctcaacccggcgctcctcgagcaggctgatgccgccgtggccggtgacgtcgagcgggatcttgtggaagttgagtgccggcgcgggcgaggacggggcgacgccgttgaccactggcgatgtagggagggcagagccgagagggactgacggcgaggagggagcggtcccgccgtgcatcgacgctgagaggaccgacgacgaggtgaggctcgacgtcggcggcgcgcaggcagacatggcggcggcgccctgcaagcgaacagaaaaggtcagtggcgtggcttcgggccagagcaggcggacgagctagagacgtacgacgtcgctgtcacgcgtcaagaaaacgggctttttgacgccctgctgggtcgacgacggcacgtcggccagcgcgtcttgggccgagggcggcgggatgttgcgcgcgtcgctgtagcggccgatgagggcgagctcctcattgagcgtctcgttccgatactgcatgcggatgttggggacattggtctgcagaggcccaaggcagcggcgtcagtgttgcgagccttggttcgagagcaagagcgaggcccgaccttgttgatatcgttaccctcgacaccggggaagtaccagcggtcgccaatccagtgccgcttgacctgcatctcccagcccgactggtggacagagttacgagcgagctcgcacatgtcggccggcgaaaacttgtagatctgggcggcgcacgagtactcctcaagcagcggctccttggtgaagtggaactgcgcggggtatccatcgagatcagccgagatgcgagacgagcgagggagggtcgaaacggacctgcagcgggtcgtcggtcgagagcgaaacgttcatgccgacgcggaagtagtccttaatcctgggcaggcgtcaaggggaaggaggtagggtcagccgagagctcgcggcagtaatgagagacgagagagcggcacgtacgggttgcggtcgtacgtcaggaagagggcgttgttgctcagcggcgacatggccaggccaatctgcttgaggtaaaagaggtactgcatgaccggcaccttgcggaggaggatgccgtgcgagatcgagtggctcgtgaggaacgccgatgacaggtggtcggtgtcaccggcctcgcccgagtgcggccggaggacaaacgtattgaagccgcgcgacttacgccaggcgttctagaagagagcagggtctaatttagcaaagcccccggcagcagcaggcccgtcgaacgcaagataacaaaccagggtgcccatgttggcgtacatgtagtagagccagtagctgtaaggcggcgacgtcgtaaagttccactcgctcgccttggggaacttgcggaacgtccggcgctcgggcttgctctcgtcgtcgacgctgcgatgaggtcggtcgtcagcgagtgcgctccctgcctgcctgctcgccaagtctcgactcacgagtcaaagccaatgacacgctggaggaaaatgtggagctcggggtgcgactttgggtccttggtgacctcgaagagcggctggaagaggtctgaagagaggaagaaggtgaaaaggtcgtcagtgctgacaaccgcccgccgctcctcactctagacgcactgcggacgatgtcctggaagttgtcgacgaggccctggcccttgtagatgtcgtacagccgggggacttggataagccctgcaaaagggcgagcacagttggacgtcagcttgcaccggcatggagaggaggcgtgaggctcggacgcacatcggacgttctgttgaaaggggcccgatagtcgagtcagtaaacagccgctttttgcagacagtccaaccgacgcacgtgggagaagagcttgttgttgacgacccactttgcgagcttgtcccactcgttgacgttgcgcgcatagatcgagatgcgccactcgacgtgctgcgtgagggcaaagggcatcagcgagacaatcaaaccagaggaggcaagtcttgaggccctacctggtacttcgactgctcgaggtcgctcatgagctctacaagaaggtaagagggagacggctagtcagcaggcagcgacggaagtcctccgaggtcagggcagacgcaccctgcgtgagctcagcgaggtagcggccttcgatgaagctacaggttgcgttgagaatgtcagcccttgcagcagcgattggggtggctctggtacgacgcacttgtcggtcttgctagagtaggcatacggcaaggcaaaaggtcagtggacaggctgaggacgatggcaagcagttgcagccagacgaacaggaaaatctcgcgcagacgcgagctgccggtcgggttgtactgtagcaatgaggaaagcggaacaatccgtcagtagccgcttgtgtcccgatctgggtctggctctggtgcaccttcaggttgaacttgtcgaaccgatctgtgaaagggggaaagcgccttcagcctcctaacaatcggacgacgtcagccgcgttgaagggcggccttacggtaatcgccgtgggcgtgcatgctgaggatgagcgcgactcagtcagcgcatacaatgagaagggacgaggtacgagagggacgcactccagcaggtcgatgctgaggtcgtaagcctcaaagccgagcgactcaaagacttccttcagggtgagctccttgccgtcgcgcagcgtaacgatttcgtcgggcgagcgcttcatcttggacttgatgaagcggagcaggtgcttctggttcattgaggccgagtggtggatgtgggtgtcgaccttccggacgtctgcgcgacgcaagagagtaacaggccaggtcagtgacggagttccgagccatcagacgtcgaccgcagcaagacgcactgtaaaagtcgcggtgcgggaccttcttgatctcgctcagctcgctgaattcgtctgccaagaatcgagcggggagaggggtctcatgtcagtaaggcaagccagactggacgacgagcacgtcgcggctgactgactcaggagctggtacatctcaaacttgctctggaggaacttgagccgccgataggcaaacgacttggccgggccgtcagcacagacgccgaggactgcatgaggcgaagggaaggatgcagaggtcagcaggaggattcaggtctacattgctcgctgcgctaagaacagtggacgggaccgactgtagtcgaggtccatgaagtactcgcgcaggccgggcatcttgccgacctgaagcttctcgcctccagccttggccggccgctcccagacctggaagacgccgtcgtcgcccatggcccagtcgttggactcgtcgaggccctcgtcccggtcaagcttggccttctcgacctcaaacacctcgtccttgtcgagcccgtggtcctcgggcgtcgtcgacgatggcgtccagtgccacttcttgggcggcggaggcgggtagatcggccacgagggcggtgcgtcgggcgagtcggtcgcgacgggcacggccaggtgagcgtgctgaggcgagagcgaggtcgggtcggagaactgcgcggcgccaagtgagggtacgggcgacgtcagcgtgccgttgttgagccattaacaagccgctcgagcgcgctcaccattacagtctcgggagtgaagcccttgaaggttcggtcgatgtcacgcggattgtcgccgagccgctgcctacggacgatgaagagacgtcaatggtgtctgggccaaatgacgaaggccgcagacgagacgcacagcgagaagctcatgtacttggagcggaggtcgaggcacttctggaagctctggctgcaaggcgagacagggcaaatcgttacgtcagatgcagcgcaagacgcttgaaagggttggcggacgtactagagtgcttcgagctcgctcgccaggccgccgacgtcgtcctgcgtcttgccggccgcctgcggaggctgctgagtgaagggggcctggaggccagcgccagcccgctcgccaaacgcacgctcgtcctcctcctcctcgacgtcgagcccgtcgacaccgagaccgaggttgtcgaccatcgccggcggcaagggcacccggacgccggctggcccgactcctccggccgaaccgaggacggcagccgagggcgaggtcgacgccttctggctctggtgcgtctggtgagcaaagtagtgctcgtcggcctgagtgtcagaaggcaggaggttagtatattgctcgaggtcgagtcaggtcgacggcggacgcagaaggggcaggggacggaccgagcggagacggtgctcttgctcgtaactgaacgtcgtatcgcgctctgggttgggcgtcccgatcggcgaggggtcacccgagtcggccaggtcggatgagggcgcagacttggcggcagcagcggccgccatggcttcagctcgatgtccgcacatgtcgagagagggagatagggaggggatggaggtagggagggagagggagagcaggaggtcgaccctccgaaacggcggccgcgcccacggggctgatctcgaggtcgcccccgacgacacggagcaaggccctgccgacgtccacggagctctctcgcgtccctgacccagtccccgcgcaagacgcgtctgactcgagcccacttcggcagcatggacgcgacggacgactcgtttgtcttccccgtcggggcccacggacggtcccggtggctcgcgctagtcggccgcatgctcctggcgggcacatgctggctcggtacagtgcaggcatcgacgatcgaagcattgtctgcggcctggctctctggagcagctcgctggcagcaggctgccggagggacgacggtcggtcctctaccctagctgtctgcctgtctgcttggagctgacgcgatgcttacatcgaacgacgtctgcagctcgtgctggtcggcgcaacgctgctctggtggcgaccggttaggccgccaccgaccgagtcgctcaccatcctgcccgctctgggcttgctactcggctcgtcaagttcgccgtcggcaggcgactttcttccggtcgctcgcatctcgcgcgtcgtcgtcggcgaggcgctcgagggctttggcgcacgatcgtacctcggcatcgtcctcagcgatcgcgcagacgtcgtcatcgccttcccggtacgtcgcctggcaggccggttgacgctttcgtgtcaaagagggcttgctgacgcgaacacgctcctagcaggggtgtcgcataggcatggccgacctcgagcgagtgcatgaagccattcagcggcgtctttggccattcgacggcgactgaggggcacggctgctcttctgaactcgtaagactcgtcagtatgacctctcacctctcaccgactgtacacctgtcgtcgcaccctacggtcggcagctgccctctcgtcattcctcccgatgcatcgcgtcgccgccccccgccgggtacagtcctcgatccctgcctttctggatgtgtaatttgtagcgttatgacgctggaagccgggctacgtacatcagctatgtttgtgcgaccactctgcttgaagctgtgtgctacctactgaacgagagcacgaggcggggacgacgacgacgacgacgacgacgacgactgcgcggaacgggagagccgagtaacagctcgacctcctgctcgacttcaaccgtccattccccctccgtccccagctcaccatcctttcccgtcgccgtatacctagtgggactctcttcagccagcagtccttccaccaattgctacaggatcgagacgaagacttcgacagttgagtcgctcagccccgtcggcccatcgcccccgcgtccctccgacgccagctcgagccgagcttgtaccctccgttgccagtcacaactcggccctgggatccagtcgccatggaaggaggccgtcttctctcggccgtcacggcgtcgtgagtccctccgcgggttctgcgcgattgccgtcctctgacgctcagctcgcctaccctccgtgtcgcctcaggatcagccgcacgacgtcgccccatccgcctcttcagcaggccttcggctcagcagggtcaccaccgctgtcgctcaaggtgatgcggctctcacggccgacgttggcacatgtctcgccgcactactttgagacgccgttgtcgtcgtcgacgggcccgctgtcaagcgcgctgctctcccgcgtcgacggctcgctcctccactacgggctctcgtcggcaccggctgcccaggcctttgcgccgagcacgatgcgtgacttcccgctctctgctctgccaacgctgccgggttcgttcggcaccatcagcctcggcgagacgttcgcggccgcgctctgcctctcgaacgactcggcagccgatgtctcgcacgtccggctccgggccgagatgcagacggcgtcggccaaggtcctcctctccgagatccgcgggccagatgagactggcggcggcgtcgaccgcggccaggccttaccgctgacggtcaagtgggagattaaggagctcggcatgcacatcctcgcctgcgagatcttctggttcgacgacgacgcgcaggccgaacggaccttccgcaaggtctacaagtcggtcgctcagttatcccagtggaggcgagctattgtttgaccgactgctcgcatgcccacaggttccaggtcatcaatccgctctcggtcaagaccaagatccacattccgtacgccgcttcggcctcgctctcgccgatggcccggaaccaactctttctcgagcttcacgtccaaaatacgtcgccgcttccgatgacgttcagtcagatgagcttccagccggccgagggcctgtcattccggtcgatgaacggcggccccgccggcgacgagggcaggcgagacatctgggaggatgtggccggtcagggccccgtgctcctttccggtgacgtccggcaggtctgctggatcgttgacgagacggctcgacctggcgcgaccggcgagggcgggatgaagacgacctgggcgccgggaaccgtcctgccgctcggcaagctcgacatctactggtcgtcgccttacggcgagacgggccacctccagacgtcgacgctcaaccgtcgcgtcccgctcactccgggcccgccgctcgacccccgtgaccgactctcggcgcctgcgttacatcggaacccatcgagtgcgagcgggccgatcccgacccattcgctcccatcgtcgcctgcagggtcggcagccccactttcacccctgccaaagtcgctaccgttggaccgagctggttcgcaaacgaacctgaacgaccctcgaccgcgccgcatccaggatctcgacgggccgaccgtccgccggtcaggcgtcatgagcctcccaccgacaccgcccccaaaggactcctcgacctctggcccgccagaggtggcggtcgagggagcccaaggcctcaacgagtgggatgctgaagcctgggatgtcgacctgacagtcatcgagcgaccgtcctcagaggccgtcgaccaggcggcccggatcgagcaggtcttctcgctcaagatcagggccgccttcaagctgcgcgagggtagccaacccgctcccggcggcctgcgggcctttgagctgcagcacgcagcgacaccgccggcagccggagctctacagccgatgggctcgtcgatcgtatcgtttgcagtcccgctcgccgccgacgccggcgtcgcggtcaaagaatgggcgctcgattttttcccgctccggccagggctagcgaccctgacgggtgtccggatcgttgccgtcggcggcgcagttgacctggagggcgggcggctggagctcgaggtcggcgcgtggccctcgctcggcgaggtcttggtgcgcaagtgagcctctagagatgaccccctctcacagcctttctgcgagccgtcgcgaaagacaaagcatacaaatcgcgccagggcccgcccgctcagctcttctctgccctccgagcctcagccagccgggccttgaccttccggagccgctcggcctcgcgctgacgcttcatctggtcctcctcctgcttgttggcggccccacccccgctctgtgacgactgcgacggctgctgcgagtcgtagcgcggcgcgaccgtgaacgagagagactggacagacagggaggcggcgattgtaagtcagcgacgacgagctcaaagcacgcctgcaagcgacagaagggaccgaccgacgacatcgggatccgggctccacgccgcttgttaccgatgctctgagccttgatctcgctccgctcgccaccgggcgtcaggctctcgtcccgcttcgagcgctcccgctccttttcgagcgtcttgaagcgcggcagcggcttacgctccttgacgtcgacctgctcgacgacctttgtccggtacgccgacgactttttgacgagcggccggagccaggccagctggaggcgctcggcgaggcgcctgacccgaagtgtcgaccggcgcgacttggtgtagaagatgacgatcttgccgaggccgcacgacttaagcgtcggcgtgtcaatgtccatcttcgcgaagaaccggcacgtgcgatgcggtcagcgcctccctgtctcctgcgcgagtcagacgcccgagtctaacgccgcagaagactgaccttgacaaggatttcaaagaaggcagtctgtatgccgagcgagggcagcgtccggtctggcagcggctccagccaccgacggacggcgctcagcaagtcattgtcaacgatgctctgcaggagcgtctgcctgtgatgggtcgatccgcagggtcagtcgaggagcgtcgcgaaacacccggaggatgagcacatgcgacgcactgctggaggacgtccacgacgtcgttaagcatcgactccttggccgtcgcgtcccggccctcctttccgagctgctcatccttgtcggcggcgtcgagcatgcggtccttgagcgtctggatcatgtcatcggcgtactggtcgaggtcatcgtcgccgtccttgttgcgcttgcgcctgttcgacggctttttgataatctcgtcgatccgccggttgagcgccgctttccggactgcaatgaagagggaggaagggcggttgacgtcagcttcaagcgcgtctcggagcggtcggttaacgaaggactgactgtcatcctcggtcggcatcggcactggcgagccctcctcgcgttcgggcgagggcgaggccttgcgacgcttcttcctgcgagtgacaagggaaggaggggcggggggtcggagcgcgtgagctggttgaccctctccagctgcccgagctagctcgagggtccgaagactcacttcttgtggccctcgctcttgtcggccgaaccatcgcccctcttgccgcccttcttaaagctcatcgaaccacccgcctcgtcggcgcctgccccgccgtcaaagtcgtcgccatcaccggcaccgccgtcgtgcgcgctcgcggtcgacgcccgctcgccggcgtcgtcgtcgccttcgtcggcagacgccatgcggacatcctcatcatcttgctgcgtcgctgagccagccgcaatctgcggcgatccggcagcaggcggaggagtggctgcaccgtctgaggcggcggcggatgcctcggcagcaggagagggggaggctgtggccggtgccggctcagctggaatgagacggggtctagcgtcagcaggcagctcttggaacccaggattcagactggccgaagctgatcataccttgcggcgcggactcgccctcgtccgacgacgcctcgctctcggcctgagcgggtgggacaaagacttgatcgtaagaggcggccgagagctgctgctgctgctgctcggggacggagtcctcgtcctgtcgatggagtgtgcgagcagaaggtcagtcccacagagcatgaaaggaaaaggagcgaagtgaagccgcaccattggtgctggagacgacatgctcgcagtattgaggtacgaagtagagagggtgagagggaaggggggtcgaggatgagcagcactgaggctagcttgaggttggccgcgccggtcgactgcaaacgctggattacggtggttcatgatcgattgtagtccaactcgctttccgccttgatgcgcgcaaccggcgccgagctcaaagcctcggcgattgccaaggcacgtcggccgaccttgctctttccctcttgaccctcatttaatctcacgccctctccctctcaccaagccccagacaggcccgactttcatctctgcccgacggccgaaagctctcgatcgccctctcgtctgtgctcgtccaggtctccctcgccggccacatccgctccgccctcctcgtcccggcggcagctgtgcttccgctcccagctcgatcgaccgacctttcgttcttcacgagagcaaagcccttgcctagcagagatgccctcctcgccctggggtgatgtcgagtaccacatcgagacgtccgctcaattttggtcgggtacgtcgaccgccctctcgccggatcatcgtcggagctccccgtttccaagcaggacccggcccgtcgtcgagccgggcccttccctcgatcaggcactgacagcccttcttcttgcgttcggtcgcgctcacagaactcgaggagacgctcaaggtcccgaagcggccgacgctcgagcagctcgacaccagcctgctgacgtacatcaccttgtcggccgcctaccttggtacgttcgtcgccgctcgagccggttgcccagcgccaaacgtctgagccttcgagtctctcctctcgcctgccgacagacgagcacctcagcactgagcccctgctcgaccatgctgttcacatggtctttcggagcgttctgttccgcttccattcgcagcgcatggtcgacctcctcctccgccacgcccgatcggtgcggccttccgcttctgccccgcccggccctggctcgcgctgaccactgtacctgatcttccagcgtgatgcgacgccgtgcgagcactatgtcgtcatgtcggccctcctcgcctacggccatcacacgccagccctctaccgcggcctcggcaaatggaggccgctcctccagcgcctgctgaatccgctccggccgccggatcagcgggtcggcgacgtcgagggcgagctcaggctccggatccccgtcgccaaactgctctacgagatctgccgcgtccagaagctcgaggatcgtgacctaggtcagtcgactgtttggccggctgcgcgccgcctgcactcgagccacctcgagctgaccaaaagccggcctctttcgaccgacgcagatctctttgacgagggcctcgtcgaccacatgtttgagctcgtcgagggtacccgaggccacatcgacgagacgctcaactacagcctcgtcaagctgctcgtgcggcctttccaaatacttgcaggtcgacgcgggggctgacttttcttgtcctcgcccagattgcgctcaacgagcagtttatggtcgccactctgacgccggcggcgcatcagacgcacggcgctgacaagtcgtcgcacgtcagcggccaggtcgcccaccacaggccgaacggcacggcccagcccgtgcccgagacgccgacgcaggccaagggtcaaaacagggtgctcgtcgtcctcatgcgccggctcggcgcgagcaagacgtttggcgaaaacatgatcttcatgctcaaccgagcgggtgcgtgctggtgcatgcgctgatgtcgagagccgcaacaggctgactttgccggcccctcgccttcgcagagaacacgcccgaggacctctgcctgcagctcctcattctcaagatcctctacctcctgttcacgacgccagggacgtccgagtacttctacacaaacgaccttaaggtcctcgtcgacgtctttatccgtgcgctctcggatctgccagaggagtccgagtcggtcagtcacgccgtcgtcgagctgctttcaatctgccgtccccactgacaactcgcggtgccctgcagctccggcacacctaccttcgagttctacatccgcttctgacgtcgacgcagctccgcgactgcccttacaagcggccgcagctgctgcgcgttctccgctcgacaacctcgaacccgtacggcatccgcgacatcacgccgacgaccaagcggctcgtcgagcgctgccttggcggcgagtggtgtgccgagggcagcggcaaggagggcaaaggcgtgccctcgcctggagggcagcagggcagcatgagcacgatgaccgacgtcgcgtcggcgctcggtgtcgatgcccaagcgcaggctgaagaagccgccgacgaagaaggtgacgacgaagggtcccggctttgtaagagcgtcgacgacctgaagctcggcgccgtcgtcaagctcgcgcccgacgtccgcctgccatcaggcttgacggtcccggcgggcaagcgccagacgtctctcccatcccgctcgccgccgcacctcagcccgctggtgacggcgccttcgtcgttttacagccacgataactcgacggcgccgcatctctcgtcgtcagcccagacggtcgactcatcggtcgagcacctctcgccatcgtccgctccagaccaccctagcccgctcggttcggccgcgcgacagcggcgaaaacctccagcaccccctgtcaatcgggcgaacaagggtcggctgccgttcgtcgcaggcggcgctcgtcgagggaccgagacagtcgaggagggtcgctttggctggcagacgtttgcgtagtcctggatgatgatgatgtatcttgctgacctgaacgacagccagtgctgcaggcaggcagtcatgaggcaggacgacggtcgactgcgcgggcgagcgaggtcaggcccgcgggaggcaagctcgaccgccgcgcccttgccagcgtcccttgtcgcatgcccaagctcaagtgcccttgatgtttaactttgagcgacgagtcagtcctgaagacgacgtcggctcgttggacatcatgaccgcgcggagattgacggccgggcgggagctgggcgtgtcggagccgggcggccgtcgaagctcgcagcagacacgaatacatcgagcccaccgccgtcgacgttgtcctgtccgtccttctctcgttctcgtcgcatcgcctgctcctgaccatcatctcgacgacacgctcctcctcgccctggatttgcccaacccctcaaagtcggtcacaccgcgcctctcttcaggccctccctgcgacgacagccttgcggcggcctcgatgctgacctcctgcctctctcctcttcagatgtcgagccacccgcccaagtacgatacctcgacagaggaggaggagggcctcctgtccgacgacatcatatatccgccagcggctccaagcttcagtgagttagcgttcattctcttcaggctctgcgcgctctgctgatgcatgccctgccttcgcctcgctcctacacctggccaggtcaagcgcctgcatctgaggtcgccggtgggtcgactggagagcacaccatcgtcttccggttcatgccgaggtatcccttgacgctcgtctgcgagccctccaactgcttggctcggctaccaagctcccgccaggtccgtcatactctaagaatcgtctctccgagcgatcagcttgctgacttgcgaccttctccggcaaacagcaatcggtcgacatcggccgggaggcattcgcagcattgcgggagatcgacgaggaccgcattcagttcttcgtcatccacaaggcgccggcagacacgggaatgtcgcacgtctatgccgagatcactagctcggcctggccgggcctgagctctgctccgccagatcatatcgcaatcggcgtccgggacatgccgggcgacctccagaagcgtgcgtttgagcgtccttcttgcctcttgctgagcgagcttcgtctgacggttgcttctgtcaccctctgctgcaaacaggccagcgacacgagtctttcaacaacatcagggcatttgtgaccgccgtgctcgtcggtgtcggcttctttgtcggcccttggctcctcctcacctggttgttcagcggctcttctagctccagctccagctccaagggcgcccaccactccaccagcggcagcagcctctcgtttgcaccgtctgcgaccggcagcggacgggcgtgacgtacgtaggtagactcgcccattcctagcggtcgaacgcccctatcctcagccacgacagtcgccggcgatgaccccatggagtgactggcatcgatctgtcagagctcgctgagcgacttgagcccgacctcggaccagagcttgattcgttcgcggtcagcgatggcctccttggaggcgctgaagaagcgcctgctgccgccgcccttctggtccgtcctggagaaagcaatcgaaagcgctcagtcagggtggcgaaccgccattggcgttacaggctgaagcggaggacgcaccagcgaacctccttgccgcccttctcgaggatgaccttgaccgtgctccagctgaagcggacgagggaagggtagccaaagatcggatcaagcgtcgactggaggtaggctttcgtcgtcggatctgcgatgaaggcagggtgtcagccgtcgtacactgtgtgacttctgccgggccgctccgcgcacctgacgggtagcccgagcccatcagaacttccaggaggtcgtccatgctggagatgctgtcgatgacgacggaatcagcagcagctgcttccggaagaggctcagcctcgacgccagtgtccccggggacgtcctcctcctcctccgcggctgccttgcctttcttgcccttgccgcccttgctctcggccgccttgcgcttcttcaatgccggctcctcgaccgccttgagcttgtacggcaggcctgcctctgggtggagccagtgcgagatccagcggtcgcgtgtgatctacaattgaaggagcaggagcccgttaggaaagaattcaagcgaccgacctggcatgaccgacagtctgccacgcacctttgcagcgatggacgcagcgccgacaattttgtagatcgagtctgccttcggctggactgtgaaggagatagtcctggaatcggagcctcggctgtcagcgagcgagcgttggcacagctgatcaagcctcggcgacacgctcacggaaacagtcgcgagagcttctcctgatacgggccgcaagcgccgagggcgtcgacatagcactgttggcagcaaaggctgtcgtcagcatcacaagtcgcaccctcgaggagcgcgagtgagccaaacctctgctaggtccacgccgcgagcgaggacctcgcggatcagcaggacggtcgcgtcctcggcctgcttgttgaggttgatcgggctgatgccgcgcatcatgttggtcgaaatgtcctgcggcgagagcacgcgggtcgaatagtggagctcgttgtagcactcggcctcgccatcggcttgggctgacgggccgccggacgggttcttgaagagggagaagaggcggtcgcgcgtctcgtgcgagagcgccttggagtcgtcaaagccaagcccctcgagcgtttcggagaaggagagcggcgcaaaggcacatgcgtagaccattgggcctgtcgagcggtgatagcgcgagcgtcagcaggctgcgagaacgtgaacgagacgaaagcgtccagagccgcgggcggggcgcaccgagaacaggtcctcgtccggcctcgtcgatgcccatgacccatcgctccttctccttgcccttgatgctgatctcggcctgttcaccatcctcgccctgggagcctgaacccgatgccgtcggagctgcgtctgccgcagcatcgctcagcatcccgtgccgggcgaccgcgagcgaggccgacgcgaccttctccgacggcagttggtagcgctcgcgtgtgaaggccgagagaggcgagtggtacgtgtatgagcggaggagcggcgagctcggcagcgggtcgatcggatcgacgagaagagacatgatgggacgagaagatgggggacgggcaagagggtcaagaggcagaagcagagcgtcgtcgcgtttggctcgagctcggagctcacgtcgacgcgtctccgcgcgcagcagcacttcctcaaagccgtgcgtcccctcgccgggacgagctgcgacgacgagacgcgaagcgacgattatcggaaatgtgggcatccatctagccctcccagcaaactgccagccttctaggcgtcccggggctcctcctacaagctgctcttcctcgcgaggatgtcgccgagcgcgagcgcgatgccctgcgtcttggaccggatgcggatgtggccgctgatgacgccgtcctcgccccgctcgatcgacaagttggcgagcgcgtcctcgcctgagggttgatcgctcgtcaatagaccggtcgcaaaaggacgggaagggagggacgcaccaaagagcgagcgggcgtagcagtttgccgacaggaaatcgcaatcgcccgagagggcggcgtcggcggtgaggcaggccatgttggtcgacttcatgatgtgctgcaggtattgccgcaggtcgctaatgtcggtgttgacgttgaccttgttctcccactcgaactcggtccacatgctccggaactgggcctcgttgcagtaggccggcttgatgtagtccataatgtcgacgtggatgtcgttcaggacgacggtcgacgacaggtcagacgcgccctggccgtcgtagacgatgttgccaaagatgacgcccgtttcggtcgacgagaccttgatcgtcgccttgatcgagtggaagccgtgcggggcgagcgtgtgcgcgaccggccgctcgaccagcttgaggtcgccgagcgttgcaaagtcgatcgtcaggttctggagcgtgtcttgcgtctggttgacaatcaggacctcgagcaggatgtcaaactggtggacgttgacgacagcctcggcgtagaccgggtccgagaagcctgcggacggcggcggggcgaggaggcagctgacggtcagcgccagacacttttggatgctcaaaacacccgacttcaacgcaccagtcagctggacgacccggctgagcttcgagatgaagtcgtccttgagatcggccgcgcccgtcgccctcgtcaggtccgtgtcgagctgcaagcgaacgggattagtcagctggatgatgagaaaggccctaaatagtcaagcgaggccccacctcatctgtgtcaccgccggcagccttcttcgagaactggcggaagacgatcttgtcgtcggcctggacctggctcgacttgttctcctttgcccgcttttcggccaccttgcgctcggccgtcgagaccatcttggcgtacgctgccttggtatcctcgaggaaaatctcctgcgccggcttcgagtcctcgagctgggcgagcgtctggacgcagttgaggatgcgctcctgcgagtcttcgtcgatcgggacggcgacaaagcgcgactggccgacgcggacgatcgaggccatgatgagcatcgcctcggcccggaggctgttgacgatgctcgcgtccgacgagatctgatgcagccggaggacgagcttggtgatgctcgacgagaggaccgagccggtgtaaaagtcgccggcgagaaggagcgcacgcagcggcgccttgctcgcagcccgaatcttggcaatcttctccttctcctggacggtcgacgagtagacggtctcggtcgcgtacgtgccgtcggcgaggacgcgcgtcgtcgtcgacggcttgtgctcgaccggttttgatgggtcctcgccgaccgccgggccctcgagctcgtccagcagtcgctgttccgatgcgaggatcgggacctcgccgataatcttgcggatcgcaacaaaggcggcctgaatgtctgaaaacgagtaacgccaagaaccacgtcgtcagccctcttggtgacgagcaacacaacgatgtgactcgaaagacgcaccatcgacctcgctgcagtactcgccaacgatccagagcgcgccgcggaagaccttgcccgacttgacgtcgccgatcgtctgcagcaagcgctcggtgatcgtgtgcctgagcttgggaaatttctcgacgacctcacggacaaacgagatgacgtcgacggccgatgagttgccggcgtcgccaatgaactccatgaggacgtggacgaccgacgccgcgacctcggagaacttgatcgcgcacgagtggatcgactggatgagcagctggcggtactcgaggttctgtcgctcagcgggggatgcccagggtcagcgaaggactctctcaggcggttgtgtcagaggccagcgcaccttctcgtagcctgactcctccatcgtgttggagagctgcttcttgagcgagccgacgacctcctcgacgttgcggccagtgaccatttcgagcgcgacgctcagggccttgcgccgaacctccatatcgttgctcgcgaggacgcggagcaaatccatcacgagcgggtcgagcacgtgctcgtgccgggcccggagctggttgatacgttcgaggacaatgagcttgacattgttgtcggcctccttgatgcagagctcgataaaggcgctcgcgctcgccttgacggcggccgggttctgcgtgagcgtcgtgagcgacgtcgcggcctcgtacttgaccgtgtgggaggaggcgttgaggagctcaaagatcgttcggatccacttggccttgtgcgggccgtcagcgttggaccgggcctccttgcggacgaggtcgatgacggcaagctggaagagctcgtccagtgccgggaccgagtcatagatcgacaggaggtactcgaccgccctctggggcgccatcgagctgagcgagacaaaggcattgcgcttgcacgtcgggtccgactcctgcaggacagagtggctcgcgcgcttggtcaatgctgcgacgccttggcgacgacgatcggcaggaagggacgcacggcggccaggaaggtgagaaggagctccggcgcgtccggaatgagcatctcgtgctgcttgtagattgagaagacggtgaagacggcattcttccgaacgtaggcatgccggtgctcctgaaaatgcggacgagcgaagcgtcagcccagtctcggcaagctctggcgggctcacgaaccatgcagctccggacggtcggcaccaacggctcgagcaactcagcttcgtgaatcttttggacggcgcgcagcgtcgtgccccgaatgtactcgttcgggtgttgctgcgagacatggaaaagggtcagcgtcagccagcagctcccaccccttgagcagctggtcagggacggaccaggtcattgcggatggcattactgaggtgatcatacgaggcgacggagggtcagcagtgatgctgaaggagcccaggctttgctgttgacgcaccagacgaggatcatctcctgcttcagcttgccgttgtcatcgagcttggggcagatcctgggccgccgacagtcgatcagccatcacgccgccgaaagagctggatgagcgagtactcactcccaatagaaggcaagcatcttcttgatctgcttgttgcggttcggcaacacgaactggatgatcggcataaggaggttgggctggcgaagcaggcagcgggaggagaagcaataccggcgaggaagtgacgaacgggtcagcatgccttatttggctcatacgacgcaggaacctcagcaacgcgtccttggagagctgcgagtcgagctgctggcagcgggaaggccagccgagctgatccagagatgcgcagggccaacaagctcggcgcgctgctgagcatgggttgctgggctccctccggacctccgccggccggagccttccactatcaggcagaagcctacgcgagagctgcgacgcacatgaggctggccgttgatggtggagatgataatcttgcggagcgtctcgagcttgacgtcgtcggaccccttctcgagcgcctgccggagctcctgcgtcgaggcgagcgacgagtggccatcgtccgcgatgagcgtgtacgagatcgggtcggcgttgctcatcctcgctgacaagttgcgggccgtaacctcggtcagaaagagctggtaaagggagaaaaagagggagggaggagcggttgaccggcgagatgggctgagggcgagggtgtcgcaggcggaagcggcgtgcgcgtcttgctggggcggctcggtcggcttagggttacggacgagacacgcggccggagatactagatgaaagcggccggcggcgagcgagaatcaagtagcgagtgcacatattaaggagcagcccttcgggcgagagcagagttgctgagcggatgagcgagagctaacgggtacaacggggcgtgagaagcagcgcggaacagtgcggtgggtggatggagagtgagggtcgtgcgtggcagagatgcaaaagagggggagtacaaggaccagatggggctggaggcggccgagagtgagagcgtccagagcaggaagactgagaggcagacggagggccgccaccgctcaacgtccttcagcccagcgccggtggacctcctctagcttgtcccaagcctcctgcagaagtgaaggctgtcagcgcagcctctgtggcgcagaactgaagcgaaggggccacgcacgtcggccgtaaagctgtcgttctcgcgagcgtacgcgacgagttgggccaacaccgtccgcgagaccgagatcgagtctggtggcaacgtctttatcttgggcgttgccgagtggctggtacctggggacgggcagagaggcagcgtcagtacaactggcgggagcctctcggccaccgaggagacgcacgcttccacggcttgagaaagtcgtggtccattagctgttcaatgtctggccggtccttctcattccggccgtggcaccaacgcatgacctcgaccgcgaccggatcgaccgggctgctcatctcttgcttccgacgttcggcctcgtccggcggcaggttggagagcaccggctccgagctcggcgggtacgaaatctggtactttggcgagatgatggccgaaaccttggccgggtggttggtgaaggacgagaacggcagcaggttgtagaccatctggtagaggatgcagccgagcgcccagacgtcggtcggcttgccgagctgcagaagagagtggtcagccatgcccaggagggtgcgtatcggtaggcgtcaggacgtacgacaatatggggctcgccattcgaccgctggaccgactctgggctcatgtagttaagcgtaccgatctggacggcgcgagcgagggtcagtcgaggcgcgctgcgacggtcgaccaaaaaacacgacggacctgattgtctcgccggacgtggacggtgtcgccctcaatcttgtgcgagatgccaaagtcgatgatcttgagtgcaccgcggacgaggacaaagttggccggcttaaggtcggtgtggataatctcgcggtcgtggacgaccttgacgcattcgagcatctgcggcgcgagttcgaaagggggagggcgtcagccaccgtgcgagacgacatgcgacaaggggtgttgcagcaacagacctggagccaaaagtagccgacaaagttcatgttcaagcgcttgcccttctgctcttcgagcagctttgaaaagtcggcctcaccaaactccatgacctaaaggcggccggcggtcagagtcagctctggtccgaggtggaccagcctcaagtcggaagacgcacgacaaagattgcctttggccggccgccggtcccacgcgtcgtctcctcgtcgtcgagccggatgaccttctcgtccccgcggaggctcttgagcagctcaatctcgttcacgtagttccggatcgcgtcggcgtcgagccggtcgagcgagactttcttgatcgcgacgagatcgcggcccgagaggcacttgaagaccttggatgacccaccgcggccgatctggcagagcttttgatacgaccggccgttgacctgggaagcagagacggaagaaggcgatcagtggcccggcagggacctttgttcgcgcgcgcgagagccgaccaacctcgatggtcttctccttcttcgccgccccagcgccgggtaagggcacggcgacgacctggtcgacatgcgcgcccatcgcgcctccgccgccatttatcggcaagggcggcggcatgggcgcaaagtgccgcttgtgagcggtcgactcgtacagctgctgttgctgctgctgttgctgctgctgctgctgctgatgcgacgggtggtactgctgtggctgctgctgtcggtcgtaattgtgggcggtcggcgtcgcggcgtagagctcagactggtactgctgctgagactgttgcggctgcggacgcggcgccccctgcgacttgtgcgcatagggcgtgtactgcagtgttattggcggcggtcgtggtgggccagctgggtgcggtggaggcggtgccgggtgcgggtgcgagaggatatgggcgtgagacgggtgtggcggggccgtcgtctggggaggatgaggcggaggcgaggctcgcacagcgtctcgatcgcggccgtctgctgatagtgtcgagtggtaggctggccgcgagggccgttctgtcgatggcgacgcagacgcatagtcacggacgatcggtgacggtcctcgtcgggtgctgttgccagctgcggcagcagccaacgagcgcccgaggccgtgcgcgccgccgaatggcggaggcgtgctacccatcagccgaggcgagtcggcgtacgacgacgagttggagacagacgtcgccgctggtgaggaccgctgcgagctgccgtcatccggcccagcgcgcgagctgtggaccgagctggcgctctctggcgagcgatccttgcggcccgcattgacctcatcctcctcgttctcttccagcagaacgccccttgcgagtcggtcagcctcgcgggcttctcgctcacgtccttcgcgctccagctccaggagccgttgttttcgctcctcggccgtgacgcggacggcgccgccgagtaggcgtgattgcttgacgcttacactgacgccgagaggacctccagccgccgtcagggcagacgacgcgctcgccgacgtccggtggcgggacgttgcggctccgggcgtcatcgagggcgggagggccgcccgcaaggtcgccgtcgcattcgttgttatcgtcggctcgcccagcatcgaccgcggcggcgacgaggcatcggacgaggtagagtaggacgtcgacggctgcagcggcatcaggtccgagtgcgacttggtctgatactgcggaggtagcgttgggcagtcgagcgaagcgcggtcagcgggcgggatgaagagaaggattgccggcccccttccctgctttcttgttattggcagcgatgacaaggaggcgacgagcgcaagcagaacgcgtcacgcactcggtccatagctcgtggtcgagcggcgtccagcaggaggccatcccggtctagggcaggcgtcctcgaggcaagcaggcgggcgctccgttccttgcgctcggggaatggcgagaagccggtgacggcgccctcgagccccttgaccgtccggcggaggccgcgtgagctgctggcgaccgggcggccatcgttaccgtcgccgtcggtcgtcgagggcgagccggcgggcggaggcggtgacggcggcgcgcgactcgacgtcgacgtcgtcatcgacttgacgggcgacggatagtcatagtggaagcccatcttgctcatcgagagatcgggctggtcggacgagtcgttggcgctggccgggccctcgaggtcgtcgtcgtcggcgtcgtcctggccgtggctgctgcctgaggccgaggagctctggccatggcgggcggccaagtaggccaccggcgaggcgagcatcgggggaaggagagacaggggatgccgagccgaaggggaacaaggagagacgaggtcgaagctgggtcctgctgccttgctcgcttgctcaggatcgtcgacgggaagagctgagcttcggccagtcggtcgcgtgttgaccttgcgctcccgcgcggaggggacgcgccgatgcggtatacgcaggctcgatgcatctcgcaaggctctcttccctcgcccggcgagctcgacctcgtccatcttggcctcgttgtccccttccagccctccagcccgtcagcccagcacttctccttctctcccagatgtcgcccgcgttcccatcggcctcggccgaggagctcgccgctctctttcctctgacgtcgcccgtgccgacgccgctatcgcacccgcacctcatccacccgtcgacgctcgcgaccgaggaggacctcctagccgagccgacattccagcgctggtgggaccacatccacaacacccggcgccggctcgcgctcgtcgagcaggacgagctcgcgacgctcggccctgtcgccgacgacccgacggccgccgtccttggcccgctccggaccgaggccgctcggctgacgctccagacggtgacgagcctgtacgagcgggcgctggccgtctttccgacgtcgttcaagctctggaagtcgtacatgctcttccggcactcgctcgtcctcggagcctcggccgccgccggctccaagaaggagaaagccggcctcaagagcgccaagcgcaagctcgacacggctgagctcctcgacgaggtccggcgttcggccgactgggacggcgggctcgatggcatcgtcggctacgaggagtggcgcgccctcgtcgcgacgggcgagcgtatggttgcctggctgcccaacgtacgtcgccggctgtccctccctgcgacctgcagctcgctgacgcctcccctcttgtggttaccgcatccagctccccgccgcctggcacttccacctcctcccgctccttcatcctcactgcccctcgccactcgcccggacgtacgcgcgccggacctttgaccgtgcgctgcgctcgcttgcaccgcctctccacccgcgcatctggtcgctcttcctccgttgggccgagctcaagggcggcgaggccggccgcaaggtctggcgtcgcttcctcaaggtgtgtcgcgacgaccttgctctgctagctttcattcgtacgaagctgatatccgctccatgaacgtccctggttcgcagatcgacccctccttgacggcaacttacctcaagactgcgctcccgcagccgctcgagtcgtccaagctccagctgctactcgcccggcgtgccgcggcgggcacttacacgcccgaggacggccagtcggcctaccacctgctcgtccagtggctcgagggtgtcgaggccaacgccgaggaggtcggactcgactgggacgagacggccgccgagcgggcccggctcgagcaggtcgagaaggacaaggaggccgagaagtcacggatcgcgagcgagggtgcgcgggttgagggcaagctgatgcgcatcgacgggccgatgaaggtcctctcagaggccgacgttgctgctcaggccgcgggcaagggcagcaagaaggcggtcaaagaagcggcgccttacgttgaggaggaggacccgagctcgactcggcgactcgacgttgagaagatcgtcctcgaggacggcttgggcacgtacaaagaccaggccggtcggctctggaccggtctcgccacctactggatcaagcgcggcgagtttgagcgcgtgcgtcctacttggctcgactgtatcggcttcaaaccggccgggacgtcctttcgctgactcctcccccttcttccctcttgcaggccaagttcacattcgagtcgggcctcggcgtcgtcgtcacgatccgcgacttcacgcagatctttgacgcctactccgagttttccgaaacgcttatctcgaccctgatggacgcactcggcgaccagccggacgagcccgacgccgaggaggtcgaggaggcggccgagctcgaaaaggagctcgatggggcgatgaaggactttgaggacctgatggagcgccggccggtgctcgtcaacgaggtcctgctccggcgcaacggcaacgaggtcgtcgagtgggagaagcgcgtcgccctctttggcggcgacgacgaaaaggtgcggctcaagacttgctcgaagtcggccagacgtgacgttgacctgccgttctcttcgcgctcaggtcgtcgcgacctacaacaaggcgctcgagacgatcaacccgcgcaaggcgaccgggccgctctatccgctctacgtcgccttcgccaaattttacgaggagggcggctcgaccgaggacaaggccgagcccgatctcgcgagcgcacgaaaggtgctcgagaaggcgacgcgcgtcgcgttcaagacggtcgaggagctcgccgagatctggtgcgagtgggccgagatggagctccggaacgagtgcgtccctttgccgtccagcgactcgggctgacggcgtcttgccttcatgctgaccggcgtttgagcactcgcccgcaggaattacgacgaggcgatccgcgtgatgcagcgggcaacgtcgacgccgaaaaacacgaagatctcgtaccacgatgactcgctctcggtccagcagcggctgttcaagagcctcaagctgtggtcgttctatgtcgacctcgaggagagcatcggcacggtcgagagcacaaaggaggtttacgaccgcatcatggacctccggatcgccaatgcccaggtgcacaggtcgcagaacagctcgcttggctcgcgcttcgccccgctgacgccttctcggctgctgcccagatcattgtcaactatgcagccttcctcgaggagaacaagtacttcgaggagtcgttcaaggtctacgagcggggcgtcgagctcttctcgttcccgatcgcgttcgagatctggaacatctacctcgcaaaatttgtcgagcgctacgtgggtctccccacccttctccttctgaccgattcggcggctgacatcgcgcctccccttcccttgcacaggccggcacaaagctcgagcggacgcgcgatctcttcgagcaggcgctcgaaaagtgcccggacgctttctgcaagccgctcttccttatgtttgcccagctcgaggaggagcacggccttgccaagcgggcaatggccatctatgaccgcgcgacgcgggctgtcaagccagaggaccgcttcgaggtgcgtcatgcctttgcgccagacttaccgactgatccgtccagctgacaccgtctgccgccgtcctgtttaagatgttcaccgtctacattgcaaaggccgccgccaacttcggcctgccagcgacacggccgatctatgcgcgcgcgatcgaggtcctgcccgacgcccagacggccaagatgtgcctgcggtttgcctcgctcgagcgcaagctcggcgagattgaccgggcgcgcgccatctatgcgcacgcgagccagttctgcgacccgcggacgaacgccgccttctggactgagtggaacgccttcgagagtgcgtggcccttctcgctttactttcctctgctctccctgactgacctccatgtctctcgcccccctccgacagtcgagactggctccgaggacacgttccgcgagatgctccgcatcaagcgcgccgtccaggccgctttcaacaccgaggcctcgtacattgccgcccaggccgccgccgcccgactcgggaagaagggcgacaatgacgccggctcagatgacgacgaggccggcgcggcgaaggaccccatggccgccctcgagggcaacgctccaaagggcccaagcttcgtcgccgccaagcagaagggcgtactcgacgccggcactgcgaaggatgccgagtcggccgccgtcgccaacccggacgagagtgcgttccggtacctgctgaggccaaatagacgagcatgcgctgaccctggcgatcatcttcttccgctgcagtcgagatggacgacgacgacctctgagcgggcgcgcgcgccgcccacgagcggctgcgcatggacgggcgtggggagcacgagggaggggaaacaccggactgcaccgtcatatttatcccctcttttcgacagcgaccttctggctggctggcagtcctcggacgatgctctgagtggccttgatgagcagcagcagtggttagcggcctaccattcgaggctccggcgttggtcgtcgtggcgggcgaggccggcgccttttttgagcgggcggcagccgcctttctcacttcgcctgattgcctgcctgcctttgctgctgttctccgcctcctctcgttcccctctttacctcgaccagcccgcaccctcttctctccttctctcctgtatctctcaaaaatgtctcctaacctcggcggcagcaagcgcgagtcgggcaccgcccgcatcctcgggtccggcacctctggtcagtgcctgcccgcctgcccccagcgtccctcgccagttgccgctggtcagcacgatagcagctgaggcccggaagactgactcccccgtcctctctctgcccttctctaggtatcgcggagctcatggtcttccacccggtcgacacgatcgccaagcggctcatgacgaacaaggatgccgtccgtccttccgcacatgctccaacggcgtcaagccgcccgatacgctagacggagagactgaccgccgacccttgacctggcagatcacgcgggccaacttcaaggacatcatcttccgtaagcacgccaacgcggccgtcggccagaagttcctctcgctcttccccggcctcggctacgcggcgggctacaaggtcgcccagcgggtctacaagtttggcggccagccctggttccgcgacctgatccagaagcacgacggcggcttctttacccgcaactttggcgagaagaagggcaagatgatccgcgaggcgactgccggctcgtgcgtcgctcccccttccgcgccggctctcgggctgtacggacgctgacgccttcgcacctcccccgccccctatagcctgactggcatcggagaggttgtcctccttccgctcgacgtgctcaagattctgcgccagacgaaccccgaggcgttccgcaatcggtcgttcctgaccatcatgaaggacgaaggctttggcctctaccgcggctggggctggaccatggcccgtaacgcgcccggctcgttcgctgtgcgtcgtctctgctctccccctgctcggctcttctgaccatcatgtcgcaactctcggcctctccagctcttcggtggctcggccatgaccaaggagctcctgttcaacctctccgactactcgaacgccaccttctaccagaactttgttgcctcaatcggcggtgccgtcgcctcgatcacggtcgccgccccgctcgacgtcgtcaagacacgtgtccagcaggccaactttgagaactcggtcggcggcatggccgtcatccgcgagatgatcaagaaggagggcatgggcgccttcttcaagggcctcaccccgaaggtgcgacagagacgctcggcagggtcgagaaacacgcctgactgaccgcgcccattcgtctcctcagatccttgtcgtcggccctaagctcgtcttctcgtacacgcttgcccagacgctcatccccttcttcggaaagtacggtacgtcggcccttctgcgccctctcgcctgcgcctgttggcctcttactgattccatttcgccccgtctcgccgtcgccagtctaaacccgatgaacctcacgccccctccaagactagaggctgctagagcgtccgccccgcggcggaccccgccggccaccctttacctttaaacttagaccgcacgctgcaccgatccctcggcgtcggtccctctccgaccttcgcaacccgctctttcctgtattcctcctcccgaggccttcgtgcttggtctcgcatcctgcctgcacgccgccgccctcaacccctcctaccgacttgtacttccgacctttgctccgcattctcccccttcatcttctgggcctccctgccctgcctccacctcgatcgaacgaggcagccgcttgatggagagacaaatgacaaccaccacccccctgttcctctagcttctgccgaaagccagccaagcatctcctgagtcgacgcgacgtggagagaggccaacgtacgtcttccgggcggaacgacgcgcgcctgggctgaactctcggcgacggcggcctgacctcctcgcccacaccaccgaccggccatatcgccttcgcacagtcccctctcctcctgcagccgcctgggccaccctctggcccttgcttcaggccctgctagcgaccccgatgaactacctctggtcgctcttctcgctcccgtcgctgccggcgctgccgacgggctatctgccgtcgctcccgtcgctcccacagaacctccagcggcgcttcctttcgttcgtcctcaagcggtcgctcggccacctcgtcaaggccggcgcgcttgaccccgaacggctcgaggcccaggtcgtcaccggccatgtcgaggtcaagggcgtcgagctcgacgaagacgtcagtcgcccgctcgagcgatggcctgccgcggtcgctgactgcgcctcctgtttccgctgcccccctcccgtcccccttgtccaggcgatcaacagcctgatccccgcagccgtgcctgtccgacttgagtcgggctcgctcggcacgctgacggtcgaccttggcaacgccggcctcacgggctcgctcgccgttcagcactcggcgtcgtcggctccggccggctttggcccggccagcggcggcgggtcgtctccgtactcgctcaacctcgccctgtcgcacctccacctgagcctcgtgctcgacccctctgggtcgatgctggcgagcgaccagtctgacggcggtcccgcaatagccgacctggcgagcagcgtccttagcgtcgccgacgagtttgtccacagcgagctcgacgcccgggaggagcacgacctgcttgcgagcgtgcgcacgctccgtcgcgaccaagactcggatccctttcttgcgcccgactctgatagcagccgcgggactggcaatgccggagaagacgacgacgacgaccacctctggctccctccagggtcgatgcggccgttcgtcgacaagccgcgcgtgaccgctaatgtcgaccccgggacggacgcagagggcgccaagacgctcgtcatgggtctcgtcgagggcatgctcgcccggctaagggtcaacgtccgggacgtgcgggtccgcatccgcttccctccgatgctcgacgagggcaagggcgacggaaacggcggcggggcggtcgaactcgagctgcgcatgagtgccgtctcctatcacgacgacagcacggcgtcggctgatcggagcggaccgggcaaggctcttcgcttctcatccttctcggtcgctcttcttcagcagccggcgcaggactcgtcaacgtcgacgccgacccgccgatcatcggcatcgacgctgtaccagccgtcgccggcccgcccctcggccgcctcgcgttcatcctcgtcgtcctcgtcagaaggcgatccgcactcgacgctgatgatgtcgcaggcgatcgccgacctccgcgacagcagcttgacggagcacagctcaagcctatacgagagcgcgaccgagggcggggctgccaccttcttgacgtcaaccccggtcgacgagaagtacgatccgtggagcagtgccgagccgctgccggatccagtgctgaagtcctggcagaccgtactttcgctcggggacgaggacgtcattctgcgtttcgactcagcacctctgtcgacgagccggttgagtcttttacggccccaagcccccggtctccagcggtcggcctcgttgtcctctggcgacaacagctcgagaccggcctcgcgtatctcaccagcagcgctgcatggcccgtcgatcagcctgcagatcccggccgtgaccgccctcgttttgccggagcagacccaggccctgtccaggatcgccagccagctgctcgccagtcgcgcagctccttcgttcccttcgtcgacggccgccccagacgccttccgttcagcagcgccagcagcgcatctgctgctcaacttgcgctcggtcacgctcatcgcagtctactccgatcacgagctgccctcggccgccctggacgccttttggagcaagccgcgcggaggtgttctcccggcaggccaccttatttgcaagatcggtcggacagaggcgctgacgaggccgccggcgcccggggtacagtcagatgcggctccgctctcgcgctccgccgatctgacattgtctgtcgaggacttgtcggtcttcgagcatctagctcccgcggtcgtcgcctctgcggccggttcggccgacccggctccggcggttgcgccgattctcatcgtcgatacggacctgccggcgcagtgcgaaggatcgttcccatcgttcgagagcaacgactggcggtccggcgaccgggcgcgcaaggctggcgctgtcgagaaggcgtggcgggtccgatctgaccgggcaaagtttgcgccttccgcaaaggggtcgtcgccggccgagcatggtccagccctgcgcgtgacgcagagtgcggcagcgacagaatgtaagcacctctgcttgcgctggcgatgatcctcgcttgctgacgatacgtcgttgccggctgactctcgcagtccatgtccttcctctgcacgtcttcattgacctcgccctcgtcgaccgtctgctgccctggctgcgctccatctcgcccatcgactcagcaacatcaatgagtgcacggacggcacgacgtcgccgagatgagagcccggccacccgcttccgcgaccctggcgtgcttgactcgctcgacgccgagtacccgagcggcagctctggagtcgagttcgcctcggccttgttgccaccgattattgttcgcgtcccgttcatacggctcgagattcgctgcccggcaccgacttccggccaagggatcggcgatggctcatttcttcggtcgggcatcctctcgctcgaccttcggaacggcgtcgcccgactcaagcccgccgcctcaggaccgcaggcaaaggcgaccgccgagccgacggcgtcgaccgaagtagagtggcagcagctcaatctcttctttctgcgggtcggagagacgcgagctcgcgcattcgtcgccgtcggcctagggcctgccgccgatacgcacgactcggcgacagacggaccgccactcctgccggacgtccaagtctttcagtcgacgatctcttctccgcggcgcgggtcgcacagccagcaagcgtcgtcgtcgttatctactgaagctcagcacctcgtctgtcgcctgccatcgattcaggtcgacgcgcacaaggcgacggtagaaggcctccagtacttcgtcgacgacattacacaatggctcaacggcgcctttggcgacggcagccggccttgcccgaaggaggacatcaagctgatcggcagtcggttctttggcgctcgacactcctccttctcgtcgtcgtccagcgacgacggccgcagcagtgcgagtagtctcggcaagtcgagcgagagtcttgttaccatcgagattgccgacagtgcgtggcccgtccctatggctcggcctcgacagctgcccgccgaccttggctgacctgatccaagctcgcagtcgacatcatcttgcgcgcacctcgggcctcttcctcgtcggacccgatccgagtcatgcagctctgggccgcagagacgaccgttacctatgacacgtccgtcgacctgaaggtgcgcacgccagcctccgatgtgttctagccagatgcctgacctgccgtcccttctctcgatgtgtgccggcagagggagtctgcgctacgcgttgccgtcggtgacctgcgcttccaagacatctcgcacctcgaggcaccgctcaagatctgcgagcggacgggtcatcgcagtctggtgagagcgagcacgatgcctcaattctcacctatctgccttctagtctgctgctgaaccaaatgtcccgcaggagtctcgcccccggccgatcatctctgtgcagctcgtctcatcggccgagctcgacctgtctaggcgcgacaccgacctcgaagtctcagtcttcaactgcactctgtttgcgagtgtcgacctctcgtggattttcgacctcgctctcttcataaagccgccggatggggtgcgtgcctctctttcgtcccttgccgacttccaagcgtcgcccaactgaccatcgtctcgctgccttctggctcttgataggccttcgaggacgttcaaccgagcgaggtcactcgcgtatcgctcctgctggatgagacgtcggtccacctcctcgccccgacgctcgccggcgcgatcgtcgtcggcttccaggacctgctcgtgtcgacggagctcatccatgatgcgccttcaaagacggtcggcctgtcggcggcgggcgttcaccttctcttgatcgacgacgccaattcaccctcagcagagacaaagccggaggcggggctgccgtcttcgcctggccactggaaggtggggctgccctcaccccctggatcttcttactgcccaagcaaagctgacgagtatccgttcaaccagtcgctcggcttcgcgcacgtcgcgcaggtgcagacgctcaaagtcctcatcgaccttcgcgactatgagcctcgtctcaaggtgtgcagccttgatcagcaaccggtcaagttggcacccggcagactgacgcgcgccttctgcagatcgacgtcgtcaggctccgagtccaggctcaattctgtccggactcgctcgcaaccctcgctgccatcattggggatctgtcaaaggtcgccgcaaagtgagtgctgtttgctcgaagtcccagggtttcgcaggctgacgggctgatgcttgatcgacttaaccaggccatcgtcttcgtcggacacaatggaggccgacgccaccttgcccgacgctccaggattgaccggtcagagcattcatcgaatcctagcccagcgtcggccggctgatcccccgctcccttgccgtctcgctcatccaggcagcatcgaagagcaggcgttccatcaccgaccgagtctcatcattgacgctgatctcgtcgaggacgatgtgccgcgcaacgccgacttcctggacgatcaccagggtccgagatcaccccctctttcgaagccctcgtctgcgttagaggcggtcagccttggagcagcttctcaaggcgcagccgttccctccgagtcggatggcgagacgatcgagctttttcacccctttgggctcgctccggtcgaggactacgcggccactctggcccagcagccgaccgctcctttgtgcgtccgccccagcacagagacagtctctcagcctccctctgattgaccttgctgactcgacgttgttgctcaaaggcccgacataccgtcgaccaagcttcgcgtgcgcgactgcgacgtgtcgctccagcttcacgacggcttcgactggtcgagcacgcaaaaggccatcgagctcggggtcaagtcggttcgccgccggcttgagaagatccggcagctgctcgcgagcggtcagacaccagacgagagcgtggagcagaccgggacgatgctgttcaactcggtctacgtcggccttccgcagtatgcagccgacgccgacgcacacccctacctcgccgccctcggcgacgaggacctgctccaccttgactttgcggacgacgcaagccaaggctcttctttccagtcggtcaaaggccggccgagcggcggatcgcctcagctgccggcgaaggctcgggccaaacgcaaacagctgactcggtccaagcatgcgcggatcgtcgttaatctcagccaggtccggatcgccttcgaggcgtttgcgccatcgtcggcgacggcctcgagcgtgcgcctgacggttgacgagctcgagatcctcgaccagatcaagacgtcgacgtggaagaagtttatgacgacactccgtgtcgacggccgcggtaacacgcgcgaggctgactcgcacatggtcacggtcgagctgttgaacgtccgcccggcggatgatccctcacgagaggagtgccgtttgcgcgtgcgtctttactcccctgagactgccggagacgggaagagctgacctcgggcggcgacctgtacaggccaagatcctcccgttgcgtctgcacgtcgaccaggacgcactcgactttctcaagcgtttctttgccttccgcgagtccaaggaggcgtcggcgcctccgacgtcggaagctggcgccagcagccgccgggaggtttacctccgtgcgtatcgtgcaagactcgcccggcttggtctcgaggctgacgggattgacgcttgtcctgcagagcacgtcgagatctttccgattcagctaaagctcgactacaaacccaagcgggtggactaccgcggcctccgcgacgggcggacgatcgagctcatgaacttcttccactttgacggcgccgagatgaccctccggcggatcacgctctcaggcgtacgtctcggatgctggctcacaccagctccgcgcgggcccctgactaacgtcgtcctctttctgcaggtctccggctggccgcgcctgtttgacacgctcaacgtgctctggacgcccgacgtcaaggccaatcagcttgccgacatcatcacatcgatcgcgccgattcggtcgctcgtcaatgtcggctcgggcgtcgccgatctcgtcctcctcccgctcgagcagtacagcaaggacggtcggctcgtgcgcggcgttcagcgcggcgcgacgtcctttgtcaagtcgaccgcaatcgaggcgctcaagctcggcgccggcctggcgacgggcacgcaggtcgtcctcgagcgggccgaacacgtgctcggcggcggacggtcgaaccggtttggcagccccgtgatgggcgaggccgtcgccagcagcagcgaccttccgaacgactggcactcgagcagcgacgatgaggtcggcccggccgaggctcccagccgttacgccaagcagccggccgacgtcagggagggcgtctcgaccgcgtaccggagcctaagccggaacatcaactcggcagccgagacgatcctcgctgtcccgatggaagtctatgagaaggccgggaccgacgtgagtgtttgtcgcccaggcgcccttgcgacgtcactgacgttccttgcaattttccggcagggtcccgtccgtgccgtcgtccgagccatccctatcgccgtccttaagccgatgattggagcgagcgaggccgtcagcaagacgctctttggcctgcgcaacaccatcgacccgggcgcacgccgcgacctccaggacaagtacaagtgaaggggaacggcaggcctgctgcaggcgacgacggccctgctgctggactcgaagcgatcgcggccccgggcgtgcgaagcgctaaaggtgcaggcgctccatccatggcagcggtcccggaggctgcgcacccaggtcggaggccgacgggcggacgacccatccatgcggtcgacggaccctttcttgcccttgccctccaccatcctccacacctcttccaacttctgcgacggctgctccttgctgaggccggagcgcgacccggctgcaggccgcagcgaccaagcctcttggctcgctgtgcactcctcctccggtttgatccgatctcgtttgctccctcatccgagacctggcggccgcgacggcgcctgtactcgtccgatctgcatgacctgctctatcatatcggccaccaggctggacgtactagcggagagagagagggagcgaacatgggcaaccatggccttctccacggactacatcgagcggcatggaacccttccttgtgtgctgcgcctgaccggtccttccctcttgctgaggcgtcctcgcgtgggaggacaagcagcctccttcttccccgacaaaggggctcagcttggggtctgagggggaactcggccggggtcgacgggcggagggccgctcgaatcccgtttctcgggtcgaggtgagccgtctcagggctcagcagaaggcgctgctgcagcggagacgctcctctgccacctctgacacccctcgcctcctccgctttcgctcgttctagcttgtctcagcatacgaactatcaccacctcgccagccagtccttcatctctgcaggcacgacaggtgcgaccgctctttcgatagcggaccctcgacctgcgggctgacacggaattggtcgcacgcggaccctcctcccacctcgctagtctcggtcgcccaaccacccaagccgtcgaggtcgaccaaccgcctcctgccagaccgatacggctcgcacgaccatcagaacaccctcctcctcatcctggccgtaccttcaggctcaaccgaccgcgagtgccgcctgctggccccctcctccgcgcgcgacgcgcctcgacctccctccgatccagctctgagaccacgcacgccgagcagccagcacgcgccggcctacccaccctttttgtccatcaaagacacagctcccccaaacgctgctcgagctcgatccactagttagctcgtctagctcgctgcatgtcggactctctccgacctccgacggcctcgagccggccggcgaccggcagtcgtcgtagccggctggccacgggcagctcggagcggccagacacggccgcgtcctccatctcgtcgctcggtcctgcgccgcatacgttccggcccgacctgcacgacctcagtgacggcggggaggactttgtcgaggagtccgagtctgaggctgaggagggcgtctttgcctacgcccgaccaacgaccggcgccgtcccgggcttccgcggcggcccgctgagcacaacctcgcaaggtggcagcttcagccagccgccgacgacggccggccggcggtcgatgatggctgacggctacggcggacctccgccgtcgaccgctgccttctcggtcgctccgccgtccgtgtcgttctcgcagctcgaggccatgcggccggcgacgggcacgtactcaccctggtcggccggctacgagggcggcggcgctggcgactactcgcccgacaaccggagtgccagcgatcttggtcggccagacggcgccgtctcgccgtcgcagctcgcgcccgctcagctcgtgcacgcctacgacggcgagcgctacttgactcgcgaccctaagtttgacccaaggttcggctacctcgagagcgaggcctcatcgtcggtcagctttccaaccagcgccggcgacacggcgctcagccagcagctggtcccgatgcgcaactttgcgccgcccgtggaagagggcggtcgccgccggcggagcgtcaagtacgccgagactgagcctggctcggaccacggcggacattcaggctcgtggcaatcgcactcgctcgcaggaccgacgacgatccctcacggtcagcaagaacatcactacgacgacgagtacgagaagggcgacatcgttgccgatctcgaggaggacgacagcccgtacgccgaggtccgcgcgaccgtctcaaacctcgacgactttgatatgccaggtgcgtccggctccttcgcaagctgcgcgactgtcgacctgaccctctggcgtctgaaccttgactttcctgcagcgcttacgatccgtgtctgggtcatcggcggcggcctgtcgctcattctcgcttgcatcaattgcttcctctacttccgcaacccggcgcccaacatccccacaactctgggcgttctgatcgcgtatccgctcggcgtaacggcggccgccgttctgccgatcaccacttggacctgcccgacctggctacccctaattggcggcgcccaatggtcgcttaacccctgcccgttcaacatcaaggagcacggcctcatctcgatgatgatatctgtcagcaacatcagcgcctacgccctgcaagctccgatcgcggcggcgaattactacaatgtcgatttttccgccgggttcgtcagtcttgtcgcgtgggccgacgcttaactcgagcctttgcgacgatgctgacggtgtcgcctgctccctcgtcagctttgaggtcctcctcattatctccacgcagctgaccggcatcgcatacgctggcctcactcaacggttcctagttcgttccgccctgctgcagttccgacagcgcccatgctaacctcgctcatgctctgcgcagatctggcccgcttcgctcatctggccggccgtcttgcagctctgctcgctgctcaacactctccatgctggcgatgatctgctcagcagtggcggctcaaggggcatgtctcggatccgtctcttctacatcgtcctcggcggctcgctcgtctactacatcgttccgggctggatctttaccgcgctcagctacttcagctggatctgctggatggcacccggtacgtctgcctccccagctgcacgtctactgcgcgctgacccctttctggctgtctcgccaccctcagagaacgtcgttgtcaatcagctttttggctccgtatcaggcctcggcatgggtctactgacgttcgactggtcccagatcaattatattggctccccgctctacactccttggtgggcgggcgccaacgtcgccgtcgcctttgtcgttggcttctggatcgtcgtgccggcgctctattactcaaacgtgcggcctccctccttgtctgtctggtgactcgaactcttgcctgatgcttccttggtacccttgcaggcgttctctgcgaagtatttgccgatcgcttcggccggcacgcacgaccgtttcggcgcgccgtacaacctcacccgcgtcgtcggcctcgattacggcttcgacgtggccgcctacctcgagtactcgcccgtctacatgtcttcggcgttccaggtcttgtacatgttctcgatggcgctcaccaccgctgccgtcgtccataccggccttttctacggaccgcgcatcctccagggtctccgcggccggaaggtcgaagaggacgacatacattcgcgcctcatgcgtcgctacaagatggtgcccgagtggtgaggctctctctttctcccatcctcgacgcggtccctgatcctctgctaactatttatctctgcttgtgcttggcaggtggtacggcatcgtctttgtcgtcttcttcagctgcggaatcgcggccgtccaggtgcgtcgtcaccgcctgcttttttttttgagctcgactaattcgcctgctcgcgtgcggcaggcctatccgactgagctccccgtctgggcgctcttgatcgcataccttttgcccgtgatctacgtcattccagccggctacgtcttagcactctcgggcatacaagtgagtcgactgcgtgtgccctgtcgcgccacgaatagtcgcagcaatccactgagcctccaacctcaaacccggcagtcacccatgtgcaacaccctctctcagatcatcgccggcgtccttttcccgggcgaggccatccccaacatggtccatctgctaccgtttggcctttgtcaagccagtcagtcgctaatcttatcgcgcgcgtgggcccctcatcagatcttcaaggcctacgctgtcgagacgctctttgttgccggcaactactcctcggcgctgaagctcgggcactacctcaaggtccctcctagagatgcattctggggtgcgtctccggcctgatgatgcgcttgtcacgcgtgacctgaccttcccggccgcgcttgtcagctatgcttgtcgctgcatgcggcacgactctcgcgcagattggcatcaaggagtggctcttcgcaacgacgcccgacatttgcacgtccgccaacgcgaattcgctcacgtgcccgctgatgcgctccttcttcaacgcctcggtcctttggtgcgtcgtccgcgctttctgatggaccaatgccgtctggctgaaccgacctcctctcatcttggacaggggcctcgtcgggccggcgcgcctgtttggcgcgggagcgacttacaaccctctgctctacgccttcctcgtcggcgccctcttgccattcatcctctgggtctacttgaagcgggtgcgcagtatcatcatctatggcgatagcaccgtcacgcagacgttgctgactcggctgttgcctccgacaacctgctcacgtcgcagtacccaacgtcctgggcccgagacgtcaacttcccgattgctttcagcggcccgcagtacattccggctgtcccagcgttgaacacggcagtttgggtcgtcgttaacttcttgacccgtgcgcgacgagccctcccatcaacccccttcgagcgagcagcctgattgaccgaccatctccatccagaatatgtcgtccgacggcgatacttccgcctctggtccaaggtacgtcgtctgcttccgctcgttgcattgcgcgtcgaggactgacgtgctgctccccgcctccagtacaactacatcctgtcggtcgctctcgacgccggcactgtcatcggcgtccttctcgttttcctctgccttcagctgcccaaggacggctcgcttgcactcaactggtggggcaacctcgtttggcaagagagtcagtctctgtcacgatcctttcttgcccgagagaccctgcgctcctttgctgaccttgtcgaacctcggcatactctgggcagcgctcgacggcaccggcactaccctgctggaagctccggagacaggcttcgggccctcgacagtgagttccaatttgcgccgccgctggcactcgacccggtcgactgactctcccttgcctctcctttgctgtttccttgcctcccttgcagtggcgagcctgaacctctgacgagcgcgtcgcattgctgtacgaataattattccctgccagcgtgaaaccctccttgcttgtcgtcgcaacccctcaccccctgtcccgtctcgctgtgcagctgtcttctcttgcttcaggatttacgaaccccttccggagtgacgcccgggttggaaaaccgccttctttggatcagaacggtgcgggatcgatcagccagatccgcgacggacggctgaagttgttctgacgacggcctcgtcagccgtcagactgatgctctggcgccaccacttggccgtcgagagtttgcgccgtcgagagtcgagcgccgagattgagttcagcgttttggcgagcgaggactacgggctgaggccttccgaagaggcggctgcgtaaggttcaactttcgacagacaatgcttgaaaaatgcaagagcgagtacgagcagcaatcctcgatcggtgtcgccatctctgctaaaggggccaagtcgactcggggcgagtttctgaacgaaaaggagccatacgagaccgcacgtcgcgcgcgtcctcccgacccgatgtctccctttattcgtcgtcgtcgactagggctgcactaggctcgtctggccctccctgaatactttgtccgctgagcggcaccttccctccgccgatatgagagggacgggcggcactgatgccggaccgtcttgagcagagggcccgatgggctgcgttcccggtaatcgaattgccctcggagaaagcgatgaccgacgacggacagaaacgacctcggccttcgcgaccccgcctccgcagcttgcagcgcctttgctcctgctaatcgcgcctcctcgctctctgtcgtcgtgcgtcgtcgtcgttgttcttcggaggggggacgaaagggaagcagaggagcgtggcccggtcggccgtgcagcgccgcagacgacagcagcagggtggcgcggagggtcggcggcggcggcgcagaagcggccgagcaaccttgttcccgggccgggagttcagccaccaaatttcttttcatcgcgggagcgggcgggtgcgcgcagcaggctcggcccgacgcgacgcgggtggcgggctggctgggcacgaggggcttcttggaggcgcgctgctgaccaccttttcgaccccacctcgacgaccaaccccgctacgagggagaggatccagagacaaggatggcggagggacggaaccatgtctgtgacgctcgagaatgtcgaggagcaaacgaggcagcgtctgaacataaagggcgaggcggaggaaggcgggtgggtgtacttgctcttgtccctccgacttcgaactgccgatccctcttttcccttgccctcgcacccggatcgcctgctgccttccaaccatcacttgccccgcacaccgcccttcctcccaaccagccagccagccagcagaagctcctctcgtgagtgtttgctccttcgaaggccgggtcgagcagacgacaggctgctccgtcagccctgtcgctttcctcggcgacggccgtcccgccttcctccttctgttcgtccgatcctggtcaggagggctgacgaactccctatccgtgcccatctccccttttgccatcgctcttgtctgccatgaacgaccgccgcctgcctgcctaccagtcaatatgctcttcctcaagtcgaccgccgtcgtcgccatcctctcactcgcctcggttgccgtcgccgccccggtccccgctggtgacgttgaggctcgcggcgcccgcaacggcgccaactccttcgcggcccctgtcgcgccttcggttgagatccgcggcgcccgcaacggcgccaactccttcgcggcccctgtcgcgccttcggttgagatccgcggcgcccgcaacggcgccaactccttcgcggcccctgtcgcgccttcggttgagatccgcggcgcccgcaacggcgccaactccttcgcggcccctgtcgcgccttcggttgagatccgcggcgcccgcaacggcgccaactccttcgcggcccctgtcgcgccttcggttgagatccgcggcgcccgcaacggcgccaactccttcgcggcccctgtcgcgccttcggttgagatccgcggcgcccgcaacggcgccaactccttcgccgcccctgtcgcgccttcggtcgccgagtaaggtatcgtgagtcaacgttggttgttcgatcttctggcagcgcttccatactaacctttccacctgacccccactgcagcgatttctctttcgcttcttcctactactgcgcttcgcagaggcacgctctcttaacgactcttgccctcattgcccatcctcatctccttccttcacgctttgcacatttttagagctgcatcctcctgtacacccgactggctggtcttctagtcgatcttttcatgaagcacgttactttcgtcctagtgcatcagtctcaaatacgagtgatgtccttccaatgagcttggcagaccggatattgcgactgctgaaaggtctgcggaagagcacatgtggcgggtgcgcgctgggcgcggtgtcggatcgtcccaactttgcctgaggctcgttcgcacagcagccaagacgcacgctgcagcccgactcaccgaccggagttgagtcggatcgtttgaaataagaatgctaaagataaagagaggacgctgaggcgaggcggtttctccgacgcgcacctccatctcaatcaaactcttggaggggtctgcactggcgagacgtgcagcgcaggctaacctccatagtagtcaaccctcttctgaagttatccagtgctgtcctcgccactgtcggcatcttctcgattgtggccctgtcaccgcctcaccgatacctgttaatcgcgcactcaaaatcggtcaggcgtcaagtcggaagtcgcctttagaagcacgacaattgactggggtcaccacgtcgattgaagggcaggtcggaggttgccggctgaacccgagtagagaatccagtaggaggagcgccaggcagatagccgacctctgagctcggtgtcaaacgacgagcgggtcgtgagcgaggagggccgtcggccctgcttgtactgtgttgccccggcatgcactttcagccctcgatcctaagatcactcgctgcctttgccttttgcccgacatgtaaccttgtgctgtccgtcgacgggcgcctcggacgagggaattgagggcaaagagcgagggcaagggattcatcccgcctggcaagaggaaccagtctcgcgtgcgtcgtcggtcagtcaaaaatcagtcgcagcgtcccgtcagtcgtcgggatcatacggtcgctacatgggggtttattgcgagtgcagagagcgtcagcgagccagcaggctgctgatcagtaacgcctcgatagcaggatcccttgactagtggcgcactcgatggtagcctgcaggagcaagtggcggtcgtcggccgacgacgcacgaaagcgctgtttgggctcgagtttgtcagcggccgtcgtctcagccgcacggcgattcgttcctcgcagcacgagtctgacctcgcacgaccagctcccctcacctctcctcaaacttgcctcggacgacactggacagctgccctacatgtcctcctcctccactgcctctcccggcgcgacactcgtcatcggctccctcgagcgcggcacagagtaccaggccctgatcgcccggctcgaggctgaccaggcaactgccggctcgagcgccgcccgactcgaccgctaccttgtggaccggatcgtcgatgggggtgcgtctcagcgaacccgcgcatgacggccggtagcgacagagcctgagctgacatctgctcgtcctgcgctccagcgacgacgctctcgccgacggcctactctgcagctcacgtcgtcctgcctgagtcgcagctcgcaccgctccacccgaccttcctcgcccagctcacggcagccctgagcccggcagcggccgtctacttccacctgccgacggcagcggcgccggcttctctgtcgtcgtcgctcttgttcgccggtctgcagcccgcggcgccgacggcgaccgccgacccagccgtcctgagtttcgcctcgccctccacttcagctgcggccgagggcggcgtccggcttctgcgccggcccaagaccaaggcgaccaagtcagccatctgggcgctccaggccgactcgccgggaacgtctagcggcagcggaacgatcacgccgtcaagccttctgaccgagggcgacctcaagcgaccggtttgcgtcatgcccggcgaggccgagcgggcaacgaagcgcaaggtccgtctgcctcacgccgctttcgcccgtcgggcatgtgtcctgaccacaccctacttcctccttctttttgcgcagcgagcctgcaagggctgcacttgcggtctggtcgagctcgagcaggaggaggccgcgtcggcaccggccgtcgcgttcgacctctcttccgacctgccggacctctcgttcggtatctcgaccccggtcgcgtacgtctctgccgacttgcgcgttgcactctttgcgaaaggtggcgctaactgtctcccttctctgagcagcaaatccgagcaggagaggctcaaggcggcggccgcggcggcgccaaaggcgactagctcgtgtggcaactgctatctcggcgacgccttccgctgcggcggctgcccttatgcaggtgcgccgaccctcttactcgagttgatcgtttagatggcagtgactaacttataccgtctcgtctccaggtttgcccgcctttgagcccggccagcaggttgtgctcgacggcatggccgacgacgtctaaaggcaccgcttctcccgctcttctctcactgtcgcgaccttgtgcctactatccttctctgtcgtatgatctggtgatcgtcgactgcctcccctctcctgtgtaccatcacggctcggccacttagaatccctcgtccgctccaacctatcccagacgtactctatttgacaagagtcctacaatccggctgcttgccttttgacaacctctttctcgcactattgcatggcgtgacgaaccgcctgagcgacagtgcctaagcaagacaccgagcaggcccccgacactggctgacggccgtcgcagggcaggcatgcatcgccgacctcactggcgcgagctcttctggcccgtccggcctccgccccgaccccgacctccgccacggcctccaccgcggccaccccgcgcgccgccccgaccacggccgccgcgcgaggacggcatgcccgcctcgcgcgagtcgtcatcgcggtccatgtcgtccttcccgccggcgccgtcggcaccgcgcttgcgcttgccgccgcccgccttctcctcacgcatctcgaccgcggcctcgcgcgtcgcctcgccgacgcgctcctcgagtaggccgaccgcctcggcgtcgagcgggaactcaaccatcttcttgccgatgaccgactcgatccgctggacgagctcaatgtcgtactgggtgacgacggtgatcgacttgcccgaccggccagcacgggccgtccggccgacgcggtggatgtagtccttcgagttggtcgggatcgagtagttaatgacgatgtcgaccgcagggatgtcgagtccacgcgaggcgacgtcggtcgcgacgaggatcgaccggccgcccgacttgaacttgccgagcgcaccgagccgggccgactgcgagagctggccgtggagcgggacggccgggaagcccagcatgcggaggatgatcgacagccgctgggcgtcggcgacggtcgaggtaaaaatgatgatcgagttggccgagagctcgttggcgaggtagacgaggtgcgtgtccttttgcgagtagggcgtcaggatgtagtgctgcatgagcgtgtcgacggtcgagtatctgcagagaggttgcggtcagtcagagcaggcgagctctcgacaaagcgcagcaggctggacgcacttggacgagacctcgacccggacgggattggcgagcgaggcccgctggagcttggcaaccttggacgtcatggtcgccgagaagaggtacgtattgcgctccttcggcaggaccttgagaatcttgtcgatgatcggcccaaagtcgaggtcgagcagacggtccgcctcgtcgagaacctgcggcaagagtggaacagacggccgtcagcatgatcgtctaccagcggcggccaaacaggtggaggacgcacgaggtacttgatgcccttgagcgaaaagcccttcgtgttttcgaggtggtcctggagccgaccgggggtggcgacgacaatgtgcggccgcttcgagagcgcaatcgactgcgtcatcatgtccatgccaccgacaatgacggccgtccggacaccgatggttgcgccgaggccgtcaatctgctgagcgatctggtacgcgagctcactgagcaatcggcggagcggaaccgtcagtgtagcgcacgtcagcatcgaccgcaagagcctcggcgcaagagcgcgcaaggaagcgactgcaatcagaacgcaccgggtcggagcgagcacacaggcgaacatcggtttcggatcctcccagagcgactggaggatcgggagcgagaaggcggcggtcttgccgctaccggtctgggcgaggccaatgatgtcgcggccctgaagggcgagcgggatggcctcggtctgaattgtcgtcggcttggtgaagcccattgtctcgcaggcctcgcacagcggcccaatgacgccgagcgaggcaaacgtcgccgacgacgacgacgacgaagcctcagcagcgccagaggcggacccggaggcggccgtcgagcccgaggcgtcggacggcgccggcgagggcgagcgtgaggtcgaggcctcctgaggagagggcatggttgcgggcgaggtgaagcgagcgtatgggtgacgagagcaagtctagaggagtgctgaggcgagcagagggaggttgcaggctgtcgttgatggtcggcgtcgaaggggtgagtggaggaactgcgcccgtcacgcccgcgacgttacgcgaggcgcctcgctttcccgtaacgttttcgattcgttcgtgctcgtcgggatctcgcctcccccctccttcctcctctccccgcctctccgttaacgaccctctcgtgggacagcgacgaacggacgacaccccggacgagcagcaaagacaaagaacggaaaagattacgagacgacggccccgacctcacgctcgtacgacccctgcccttccgaccgacgcctagccgcgtcgccctcctcagcccaccctcccggccgccccaacgcgagcccgcccgtctgtctctcggtcgcctctcgcctcgcaaggcctctcgcctgcttgcaacctcccgtggtcctcctatcgaccgcacctaggctccgtcgccgatcgcgtcgccgtctgcttcgctgccgccccgcccaacatggacccgacctcggccaaccagtaccagaacctccattacacgttccagaacctcgcgctctcgccgccgccgcctccgccgagcgagatgcctgccctgcccaacctgccgcagaatggcggcaacgggccgagcaacggccaagaagctggaccctactacaaggagtacgccggcaacggccagcagccttcgcaccaaggccatcagcagcagttgcaccaggagcagcaccagcagcagggccaccagcagcagtactacgagcagcagcatcaaggccaggccggccagcaacgcgcgggtcccgacggccccgccgacatgcgttcgatcggccgcaacggctggggatcgaccgccggcgccagcgtcaacggcggcactgccggcgccatgagcaacgcgagccatggcaagggtcagcgttccggcctgcctagcgtgcgtccattctatctgttctgggtttgtctcgtcgcgatggtgtgctgggcgtcgctcttggggtcaggggcagagagggcagccgacgagaatctctctgcgttgctcgctcccctcacgaccggttgagagtatgcggcgcgagagttgaggcgaacgggtcgcgagccgtcgtggcgcatgctctttgacctgtctccgatcccccattttacgagttccgcccgctcgggatcggtggccctttgtcttgctccgaccgtcgcccgccggcaggtgctgacttcttccgacccgccttcttccccaacgcccacccttcctcctcactaactctgctcttgcgcgacgcgatgcacggctaccgctttgctcatcccgggtcgctctacgttcagcaatggcttcaggacccgtcgctcatgcaccagcagggcggccagcagcagcaccagcagcagcccgccctccaccaccagcagggccagcagcactcgcagcagcagtacaatggcggccagggcggctacgttaacggctcgcagggaccctacgcccagcagggccccaacggctatgcctacgaccgctcgacgtgtaagttcgcttttgcaacgtcactgtcagctcctgcagttgattcgtcgactgacatgcctgatccgtccgctttcgcagccccaaatccgtcgcagcagctgtcgacgcactcgatctcgcctcctccgtcggctggctcgcaggtctacggcgcttcggccggcggtcctccgtactctcagcagcagcagcagcagcagcagcagggccctcccggccagcagcagcaacaacacctgtactcggcctcgcctccgatgcaccactcgatgccgtcgccgaccctccctgggcagaagtacggctttacgcctgctaatgggcctcagggcggcaacatcattggcccaaacggcggcaacgcaaacgggctcggcaacaacagcggccctggcggaggtggccctggcggctggggcggaggaccgatggtcggcgccggcctcggcagtggcgtcggtgccggacccggccccttctcgatgggccctggcgtcggcggtggtctcgaggacgatgtcatcccgtacgttgcccgtcaaccgtctcaacggcaaaaatagttgctgacgccttgctcttctcccgttcctgcaggaccgccatcgtcatcaagaacattaacttcaaccttcagaaggaggacctgctccggacgatcgagtcgctcggcgctcctctgccctacgccttcaactaccacatggaccagggcgtcttccgcggcctagcgttcgccaacttccgcagcgcccacgaggccgacgcggttgtcgctgcgctgaacgggtgcgtcaatcatcttctctcgcccctccttttgggattcagctcatgcctgtgcctctcatctgcagctacgacgtcggcggccgcaagctccgcgtcgagtataagaaggtcctccaggccggcgagaaggagcgtattgagcgcgagaaggccctccggcgcatgcggtcgatccagcagcctcaacagcagcagcagcagcagctcccgccgccgcaggccatgatgctcggccccaacggcgtcctcgtcccgccgcagctgcagcagaacggcccgcagtcgatcgcccagcagatgggcaacctcgcgctcggcaacaacgccaacaacatgaccgacagctaccccgacatgcagcctattgcgctcggccttggcctcggcagcggtggcggtggcagcggcatggacagccgggacggcagcacgagcagccagggcaccaacccagcaatcccgatcgtccaggtcacctcgggcggcggccgtatcgaccgcggcgacacaggcagtgatgccggcggcgcttcgaccaagtcggccgagctcgacctcaacgacccgacgacgctcgacatctactcgcgcgtcctcgtcttcaaggaggaccgcatgcgcgacgagctcgccttttctcgcacgctctcggccagtcagcgccgggtcgtccaccttgtcgcccagaagctcggcgtcttccactactcggtcggagagggcgatgagcgctacgccgtcgtcacccggagcgagacccggggcggcgaccgcgctcaccgtcaccagtcgtcccgcccgcttgcgccgcagcagcagcagcagggcaacggtaaccgctcgcccagcaacctctacgcggcctcgcccgccctccgtaacaagtcgtcgatgcccgacctctcgcacctccacggccctgccgtctcccgcgacccgacgcgcgccatcctctcgcagcggtcgacgatgaacctccgcgagggctacgcgacggtcggcaacgtcggagccgccgctcgccgggcgcagacgaaccctgccggtcactttcaggatcagcagctgctgcagccgccgaccggcccctacaccggcgctaagggcaacgagtcgaccgacagcctcctgtcggccgacggcggcagccagggcggcgccactggcacactgctccgtcagccgcggggcccgcccgccgtcaacgtcggcggcttcaacggccgccgcctcgttgctcccggtagcggcgcgcgcgtcaattcgcccggccttcaggcggacggccagcagcagcagcagcagcgggccgaggacaactttgccaccagtcacgagccgctggagttctgaggcgctgcaggcgccctcctccccacccctccctcctccacccccgcaaatctaaacgtcctgcgtaagtcgcgccctgctatccttatctgtgcccgccgagactaacccccaacctttggctgccgcagacgatctctcactcccctcaacgtctttatgtcaccacgccgccttctccatcaccgccccttcctaccccaacctcttgccgcctcccgacccgaacgaccagacgacacaaggaacggttcccgcccacctcaacacccctcctctccttcacacacaccgctcacaatcacccccctctgctcgacgactcgaacgaagaaactaaaaaacagaatttcacaacccccttgcgggcaccaccccaccctctcggacgactccttgactgttctatactgcttcaaacttcctccaacactgggtctgtcaaaggcctgccctcgaactcccctccttcccttcccttcccttcccttcccttcccttcccttccccttctgctcctgtctgctcgctttctcccttccttctctttaataacgccgcgtttccctgcctctccgtcgctcgctcgcatctccctgcccccctctcctcgtctctacgcaacgcaccaactgctgtacccaaagtcgccgcgccgtccggcggggagaatgttcatggagctctcgcacccgactcggaactgaaggagaggacgatttgacggtcactttctgaggcagctcgccgacgacattggtcgggctcgggcgagcggagatcgagtgagctcgccggcgacggcccctccgcgcacccgactgccaccctcattcttgcacctcactcgccctcctcctgttcttgctccactctacgagcagcctcttcaaactacctgtcgccgcatcatgtccttcggtcgcccaggtgcgctcggacttgctcccctgtcctcgaagtcgggctctcagctcgcgcaagctgctcggcattgaccgcatcctcgcccgtcacctctcacttctgtttcgcaggaaatctcgtcgactcttttaacgtcagcccgccagagcgcggctcgtttccgctcgatcatgatcgtgcgtgctgggcgttgcggacggctctcggcgagtccgattgggctaggagcgcacactgacgcgagctcgccctctacctccgaaccctagacgaatgctcggccgtcatgaaggagtaccttgcatgcctcaagagcaaccagcagaagaatgagaagtgccggacacttagcaagaagtatctccagtgtcgctttgacgcgtgcgtagccagtctatcaaccaggctctgaggagctgcgcagcaccactgacctcccgcccctccaccgcttgccgtctcggccgtcttcctcagcggcctgatggagaagaccgagtggcgcaaccttggctaccccgacacgccgaccgcggtcgtgccggcgacgaccgagtcgacatcgacagtgacgggccctgccaccggcagcttgccgacgcctgcccggggcgagtctggccctccgacgcagttcgcaccagtgccgctgcccgagagcatcaaggatggcgctaaggcggacggcgtcgcgactggtgctggcccgactggcgtgctgggcggcagcaaagggtcaggcgtatgatggctctctctgacactcgcccgagttactcctcatccactggcgcccgagatggaacgtcgccgcctgcgggcatcgtccgacagtgctgcttcgctctggcttcatgtgatcaggagccgacggacgcctctggcgccacttcgtccgttactatcggctcgagcagccaaaccttccagctgaggacctcgtgctgctcggttgacaagcgcagcgcgtcagccatctcgctgcttggatcatcggatgtggaggacagaaggactcttgactcacgctctcgaagaagccgccgcagctcgcagtgacccccagccaagcgtcccagcctccctcatttccgaccggcggcggcggagggaccctgtcagacgaacagacgcccgtccaccggtctgcgtcgttcagctcggccgcatcgtcgctagggtcagctgccagcccaccctccctcaaccgagcgtcaaccgaccccgtcgggctcgcgcagatccgcagggtgtacggccggccgtcggtgagctcgggcaaggccgagcgcggcgcgcaagacagggcgtgccggtggtgcgggtgcggtggcgaatggagcgagatatgaggcgctggagggtcgcccgtgcggtcctcactgaatgagcagcggcagacgtcgttagcggacggccggcgagtatcagcggggcatgcagaggcttaagagcagctcgccagactcacgtctggtaggtgtcgatctcgacgatccagcctctctgcgcgactccagcgtagcccatgccggcgccgttctcccccatgaccggccgctgacccttcggaaggacgaagagcccgagcgccattccgtctgcagcgggcgtgcccggtgccgtcccgatgcggaacgtcatgagcgcaacgaacggcgttgtcggcgaggggagcgggaacgctaagaaagcagcgcccgtgaccgatggcgcgcagggtgtcagagtgagtgatgccgacggcgagagtgtcgcatcgccgagcagcgtcggacgagcggcggccgttgccgcgaggtcaaaaaatgctggcgaaacgacttttcatccgcgcggaagaggaggagggagacaacggcgaggtcagctcgcgtcacctgcgaacgatgcttcgacagtgtgcgcactcttgaccgggacaaggccggcctgcgcgccgccgacgccttcacctctcgcttcgcgccaggcggcgcctccgctgactcgcccttcccgaccctccctcgcaacccgctcctcctccttgccgacccggccgcgccagtccctttcccacctccgctcactcgcatcctccctactcagctcggccctctcctcctcgccgagccccgcccgacgcttcgtcgtcagccacttcagcgcatgccgcagatcgcgctcgccgaggctcagccgtccgaccggcagatcgagcgacggaacgtaggcaagggtcacgtcgcgcgagcctgacgtgccaaaggcgagaatgtaggtgaagcgcttctgccagccaagcgagtagaggaggggttggtcggtcttgccctcggaagggtcgacgtgcacccatcggtccttggccggactccagtactgcgagggcgggatggcgagaccgtcagtcccagaaagcaaaatgagatgtggagtcgattacgcacctcgcaccagacgtggtcttcggcgcaccacacgtagcgcgcgcgcaggccgaccgcgcgcaagcagagcatgaacagattggccgcctcgccgcaccgcccccgtctggtgccaaagagcgcgcaaaggtcgttcagcctcgggaagcggttcgccctgccgcatgccgtacagcgccagagctcgacacggcttgcaccgcctgcccgctcctgggcgttcggctcggccgggccagagttcgtcgttagtccctcgcaggcctcgcagacgatcgggtcgacccagctgaagaagttgtgcttgaaccagcggacgagttcggcggcgagatgatcctcggccgcttcaacgtcgtccggtacgctcgcgtagaggtcgtgcagcgggatatgctcgagcgcgagatcctggagacgcgcgtcatcccggcccgagcgaggcatctcagcgacagaacctggcgtccgcccctcaacactcgaagatggcggtcgatcggcgagaacttaccagcaggctcctgtcctcccatgtctcgacctgactgtcgagccgcctgagcgtctcgatgagcgagctggtgctggccgggtcaggtcgccaggcgcgcgcagcggcaagcaggctgccgaacgcggcgagctcggccggcgtcggtagccggggcgaaccaaggcgagcatctgggcgggttcggcggacgtgggcgacgaaggcgtctcccagcgttgtcggtaaaggcggcatcgcgcggggatcaaggatgctggtcgagagaggatagggaggccgaagtcggacgcgtgcaacccacggcgtgccctttgctcctgcatcgccaagggccgatgtcgtttggcagggcgaggggggcgacgcgacggtctcggcgcgtcgtctcgtccgcctcctcctctgtgtcccctcgtcgccctgtacacctacctttccacgctccccttcctcttgcgccaccctcgatccggcgcaacttcacctctctctctctctcccttctctccgctctcgtttcaatccagccgccgccgtcgctgcctcgatggtgctcgccggctcactcctcctgccgctctcgcttctcgccttgctccggccggtcgaggcgagcgggacaacctgcgctccaagcccgaatgggacgacgcttacctggtggaactcggcgacgggtctctcgccatgtacgccccctgccgtcatcgaagccggcagctggccgagctcgagccgccactgacaagcccaccctctctctctccctcggctcccccgcgtcctcgcggccccgatcgaccaccatcccttctgtcgtccgaccaggcgcccaattcgagaagctctaccggcagtgcgactccaagttccggatgttcgaaatctcgaactccattaattacgtctgcgaggtgagcctgagctggcacgcggtcgctcagacgacccggctgctaaccgtcgactcccttccgacgtgccactcctttagccagaccagactagttcggacttttgctgctgctcctccgcatccttcacgcttttccaggcttgtcggtcctgccaggcaggcgcactgccagacgccaactcaaccttgcccgaccagctcttgagcgcctatctccactcgtgcccggctcaaatcatcaccaactcgtcgcttccttcaaatctctcgtcctcaggcctcgccagctgggccttccgtccggtacctgcgaacggagcttgggactacgccggcgctctggcaaacgcgaccaaggagggcgtctttcgggcagacgccccgccgatcgagctgagcaacggcgccaaggccggtatcgccgtcgccgccatcctgctcgtcgttggcggcctcgttgccctcttcaagtggatcctgcccggcatcaagtgcgtcaccggcggtcgcgctgatagctccttcaccgagctgaacaccgcaactcccccttcttgccgctgcagacgcagccgagcacgccgccgcggcgacgaggactttgaggtaaccgacgccggctacaagtcgtggtacggccctccttcgtctggcggcaaggccggctggcgcggctcggtcgccggttactttgccggcgcttcgctcgcgaacgccagcggcggcggcggcagcagcagtgtcggccggaggggccagtcgcccggcggcgggtcgatggctgcggccggcgcatggaacgagatgaaggaggatccgtcggcgtcgggcggcaaggagtacaacgatgtctacccgctatcgggctcggcggcgcccttcgcgggccagtcggccaacccctttatcgatccgaaccaggtctcgcggcccgaggggctcgacaacccgtacccggcctcgtacccgcgccatcacgaggaccgccaacaacgagacgaccgctcgccgtcgcagcggcagcaggacgatcagcttgacgacatctacggctcgtacgacgagcacgacgagtacgacccggacgcgaacgggccggcggtcgaccacgcggccgacggctgggaagagcgtgagggcgagagcgactttaaccggcagaagcggtgggaggacgagggtcgggcaggagggggcgggcacgcgcgcgaccagagctttggcggcggcggcgagcacggcgacggcatggtcggtcgctcatcctctcgcgctggctcgacaagcatcgctgatctgctcttcctcttcgatggctcagtatccggtcgcaatgtgatctctttcccagactacgatttcctctgcttcttggaccgacgtcgcgcctgctggtcacccgcgaaatgccacacctcggctgccgctcaccgagcgctcccctcaaggcggaggatgatctcggcggccggccgccgacgttttgcctcccttccttgtcggcaccggctcgcccgcacattgcgctcgtgtacgctcccgttcggccgccatcatgtctgtcccctcatccttctgccgtcgcgcgcgcgccctcgctttgcaccttcgcctcaaagattcatgtcgcctcttgtgttgttgacgggagccgacgggatcaacatcgacgaaagtacagtattccggtcgtcgaaagctatcgcacgcgccggacggaacgagatcgtccgcgaaggcggccaagcccaaagagcagcagcagcaagagccagacctgagaaagacgagggttcgagcggtggcttgatggtggcggatgggacgagatggtcagcagggcaggcgacgctggtggcgggacccgagtcggactctccctttcgagacgtcggcatgacgaaacgctcctcgccgctgggtttgcgcccccgagagagcgacgagttgcctgctgctggcgccgagtcggtcgagctcgccttgtcgcggccagcagagcgacgagcggtgaaggctgaaggcagagtcggctgaggccgagcacagctgggcaaacagccgagctggagctcgtcgaccttctcggccctctctctgccgctgctgatgtttgaatcggctctctcgcctgcttcggcgttgacgcgcctctcagcagcctttggcacggtctccctagcttggtttggctacgaaggaggggctggcagggtcggctgagcgctttccaaaggggcctaggcgaaacgcctctccaacccttcctctactggcggcacacactcctccttcctgccaacgacgacaaaaccccttgcacctcttcaccttccaccctcggcaggccgcaattccctctaggccctgcctccgtcctaaaagcgtttgcacagaagagacagacctggtgagttgctgctaggccgtgcgcagccgactggttcagcccacggccgcagccgaaacgacgctaacgaccggccgccgccccttcttcccctctcacccttgaaccgacctcggctgggcccgggccaaggatagcgctcgagcacatcacaactccggggccgtcgcgaccgctgcacctcctaccatctaccactagcggcttcggacgaccgactggcgacagcaacccaaccatcaccaccgaacgcgcccccgcctcgcacctcctgccgcctcagccctcacccacacccttctcacgaccccatcccagcatgacgagctcgacggccagcccgctcgagatccagtctgctctccgccattcattccggctgccgtcagctggccggccggccggccactcgcacgtcggacgcagcccgcgggtgatccgcttcggcgacgaggtcgacgactcggacctcgagatgactgagccagagtacgagaccgacgtcgacgacggccgcaccgacaagaaggacgtcaagaaggagcaggtctgggtgcgcgagatgctccaggaactcgtcagtcctcaccttctgtcactaccttcctcctcgccttcccgtttgtttgccaggcctccgagagataagccggtcgctgaccgaccacgtccgtcatcacctctgtaaccagtcgcgactgggctggcagccgacgcctgacggctcacgaccagcgaagacgagcccggcccatcgttcggctccctctcctcggccatccatcctcgcgacctcgccctaccacggcttctgcccgcccgacctctcgccatcgacctcgtcctcgcgcacgtcgtccttctcttcggtcatgacgtcgtcgagcgtctctcagtccgttacgcccccaggtgcgtggctatcactgccagtccacctgccttccttatcgctgacgacttcccgctctgtttcgcaggcgagtcgatcctccagtcgtcagcctcccttccgtcgacgcccacgtcgacgagcctgcagcgcaagcaccaccggtccaactcgctcagcctcccccactcgcatcggctcgcgggcgggtcgatcatcaacacgtcgccgctcgtcgccgttgcgtctccagtgcccggcacagcagcagccgacctcgccaggcagtacaccgtgaacgccagctcgagcggtacaaagagcgctcatgcgcgcaggatgagcgccggtggtcggctcgaggtcgtccgcgaagagcgggaggactgagtgacccgacgaccgagaccgtcttgccggccgactgaccaaccgaccgaccgaccgacgcacctccctcaagcccaactctgacccacaaccggtcggcacctccccgtgcgcgccacatccttatagagtcgatacgacccggccccccgagcgaacgtcccaagatgtcgccggcaggtcggcccgcccatctttcgggcctcaaggcaatttgcccaccccaaggactctcgggcacgcctcccttgtttcgcgccgagcgatcctcccacttgtatccgccctagctctagcgccatcctaacgacgtcctctgtatcacgcttcgaccttcaggggccgagtgcgggcgaagaggtcccccgacgagggtcgctctcgtgttcgacgccgaccttgtagaccattcgccgtctggcctatccgatgtaccctcgcggttcgtttcatgctgaagacgcacgagggctgactttctcgtcgagctgacgatcaggtcgggcacgctgatcacatgctggccgaaccgcggcgatctctgtctccgcctcgccgcgcgtcccttgacctccgccccccgatcacatttcgcggtcacttccccgcgacccctgtagcctcaacaagctctgctcttttcgtctactccgctcctagcccctgccctcatgctgctctccacgacgacgcttcggccggtgctgttggcctctcctcgcgtcactgccggactgcgcggcacctcgacctcgaccgcggccacccgtcggtcgccgaccttccctcttacccaccacttctgccagagcgcgcaagccaccggctcgctgtccgctgaggctttcggcctgccgctctttcggcgggcctacacgacgaagcaaccgccctcgtcgcctcggcggccggtcaaccccgcgcagcgcgcgccggaccccgacccggccaagtatgcgcgcgacgactgccgcctgccgtcgatgatcgcctcggagcagctccagaaggacggcaagggcgtcgagggccggcacttcaccgacgagtcgtcgatcgccgtctcgccattggccttgaccgagcccgtcaccggcgactggaccctcacgcacccggcctactcggacgaggcgctcgacgcggtcaagattgtccaccggccggccgtcacgctctcggacaagattgcccacaagctcgtcaagggcctccggtgagtcctgccgttcgccgcagcaacacatcgagaagtccgctgacctccaacactgcctcggccttgcagctttggctacgacctgctttcgggctaccggcaccggccgcttcccgctcggcccgagaccttctcgctcggagagctccgtatgatgggcagcgtcatgtcgccagaccagtggctcaagcgcatcatcctgctcgaggtcatcgccggcgtaccggtacgcttgaggtccgagactcctttcgcctaatcgtgcgctgatgtgttgcttgcgtcgcagggaatggttgccgggacggtccgtcacctccactctcttcgccgcctccagcgcgaccgcggctggatcaagtcgtgcctggaagacgcagagaacgagcggatgcacctgctttcgttcctctcgctcgccaagcccggcgtcctctaccggctgctaatcctcggcgcacagggaggtcagtcctgagaggtacttctggcgtcgaccgacagagctgatgctgtctatggccgccagtattttacaaccgtccgcgcttttctcttcgctaggacgcctgcccaggggactgctgacggcaccccttctccatcacagtcttcttcctgacttacctgatcgcgccgcgcgtcgcccaccgcttcgtagtgagtcggcgacgtgctaaagtaaggcagcaagtcgctgataagcagcaactcttgctcgcagggctatcttgaggaggaggtgcgccgatgaggatcggcctcagcttggctcagggtcggtgttgactctgcccgcttgccggctctaggctgtcatcacgtacaccaagtgccttcaggacctcgccaacggctaccttcccgagtggacgtcgagcaaggctcccgaaatcgccgtctcgtactgtgcgtagcccacagccgtccatattccccgttcggccgcaagaatcgctgacagtgtctctcgtcccggtgcacagggcggatgagagatggctccacggtccacgatatgatcaagaacgtcctggccgacgaggcgcaccaccgcctgctccaccacacactggcctcgctaggtcggtgctttcacccggccgcttaacctctctcgacttggagatctgaccgtgcgacgcatcgccctgaaacagaccaccggcgtgacaccaacccgtttgctcttgccgagccagactcgcatgtcaaggcgaccgtccccgggctctcgcgcgaggaggcggcggcctttatcaagcacgcgcgtgacgtcgttgagcagaagacgcgcgatgggcgcaaggctgaaggcgccgtggcagacaagaagcagacttaagcggcgatcagccagaccgactgctctctaacttctagcgatggcaatcccatgctcctttctcatctctccgactggcatgcgaccggacaaaagagggagtcagagtgcgagggttgctgcgcgcgacccgagcgttcgaaaagggcgaggctgaaagagcgcctccctccggcttccctcgctcccgaccaacgctcgcctgctgtcgctggctccctcgcctcctgatgttcgacaacgcgctcgcccagcaagcgctccagctcgcgcagctcactctgccggtcgtcctctttgcgctcctcctctcggcgttcgtcccggcctcgcgggccggagcggctcaggccgcacgcgacggagatgaggacctgcccggcgtggtacgtcgagctcccctgcctatcgtcgctcagtcagggacacaggctgccgctgacaggaatcaaactttgacttgcctgccaggtaccggtcatcttggccgtcaatcggccgcggaccacgctcctcgtcgcgctgcttgccctcctgagctcgacctacctcatctcgctcgtcctgctgctcgtcctccagcgcgggcacccgcccgccattgcagtctgggctgctgcgtgagttcttttaatcgatccgacagatccgcccacttggcgctcattgcagctattgccctctaggtctgggctcgtcacctgggcgacaacgaccgcgctcctgtacgagacgcgagctcgagcgccgccgaagggcgccctctgggccaagacgatgctctggattggcctgatcggcgagagtatgatgggctcgctccgcgtctacatctttggtgcgtcgcggcagcgcccgcacctggagacgtcttgattcccgttccggctcggccctgacggcctgtcataccctcgtcgctctcgcagtccagtcaacctcgcatcttccgcagacagcgttcccactgccctttttcctgcattttgcgcttctctcggtccgacttctgcactttgttctcgccctgtgggccatctcgagcccgcgacgcgagtttgtgcctgctgttggccgcaggtcgcccgaggcagccggtgatcagcaagacgccgaacgcgagggcttgctagccggcgtggaagagtcgaacctcggcggcggcagcgacgagactgaggcgagcggctatggcacctttgccgggaaacaggatgcccaggaggcctcgtgagtgctggccggttcgagtgcctagaggaaacgggcgcttacctgccgctgttcttctcaggtctatccacacgcagcctcgggcagcctcggtcaaatcgaaggcctcctccaaagccccctcccaagcgtccattaagacaactggtacagcgccggccgacgagggcggcctcggcccggaggaggccacccctcgccctacttcgtacgcggatgctgtaaaggccgcgctgcctgggattccctccgaggagcctgccgcggtcatcgcagaggatgaggctccggctgagcccgaagctctcgagatccccatctcggccacatccaacatccttgacctcaccatctcctctaccgacaaccggacgacggcctcttccaaggcctccaccccgccgacgccgggctcgcccgtccatacgtcgatccccctgcctctgacgacttcgacgatgccgactcctgccgagtcgcctgcgcagcaaggcctcgagctggacgctgtcgtcacacctgccgagccgcaaccgccctcaacgattcccttcccctcgtccctctcgtctcgtgcgtcaacagaggtggcccagcccgagtcggcaactcccgagtcggccgagaagcggaagcggatgacgtcgcttgcggacatggggcgcaagatgtcggacgagagcaaggctttgggccggaaactcagcctgctcaagcgcggcaagtcgaactcggggacctcgtcgcctgccaatgattctgctacctcgcccgtagacggcaccacgtcgccgaagccggactccttttcctcaccgacgctgcagaagcgcttctcactcctctcgcgcaagtcgtcgacaccgtcgactccctcgtcaccgacgcccgagcagcagccgctagcaggctctgtcgacgcgccgccggcttcggcgcccagcgcgtctcaaggtggcggcggcggtggaaagaagggcaaaggcggtcagaagggccgcaacggcaagggcaagaaggtcagcaagttcccgaaccagggcggtaagcgctcgccgcactgagcgctgccacggctgccttgactctactactcgtcaaccctaaaggaagctttgtagcctctgcctctcctccaccattgcgcccgccatgcttgcgccagacctcttgcctttgcttcacgaccctacgccgcccattctcttctccttttacgactcgaccctttccgctcgtacgattgccatggtttttagcgttcttagcacgagcggccaccatgacggggcctaccgaccgacgattccggggaccgccaacgtcgcatgtaggcgccgagtgatgtcgatcaggtgcggctcattctttgtcgtcaggaacgagtgccggacgaggaagtcgaccatcactgtgacgcaaggcggagcgagaagcatcgtcagggccgagcgactgctcgatgtagtcaagaggcctcacctagagcgcagttgggtttgaatagcccgcgatgcaggttatcgagcacctcggcaattgtcaagagctagtaaggcgttgcaccgatcagcgagaggctcacagcgatgacgagctaccgtagtctcacctcgaaagactcagcctctccatctgacggagtgggggtgaaggcgacgggcgaaggcagtcgcagatcatagatgtattgcgtctctgacgatggagaagggtcagtcagcggcagtaaagacggcagcagagcacggcagagcgcacccggttgaatccagccctcggccacccgggtcgtgtacgtgatgacgccggccgacttgagccggccacgctcgaggacgaggtcttccgggatcgacgcctcctcggcgcactctttcacgacgcacacttcgggcgcaagcccgtgcgtcagcccgcccgcgacaatctggtcgagcatcgacggaaacgtctgctttgtcttggaccggcgcgggacccagacctgcgtctcgccgtcatcagtctcgacaaatccgttgacgtggatgccgaaggtgccgacgccaaagagggcgcacgcagcgcgctcgagcgcgaatgcgccattgcggccccagcaatcgtcggcgcctgccgtcgtcgagtcctcgggcccgtagatagtgtaaagctcgtcacgccagccacctaaagcgtccttgaagagtcctcgtccgcgccaggaggcggcgatggcggccatgactgcgcttcgctcggtgaaggtcgtgcacgcgtcggtaaagtagacccgggctgcgccttcggacgacgggaacgaagcgaggccgtcgagctcggggaggaccgactcccggatgtcggccaccagctgctggaagactggcacaaacatgtggccgacggggaacgacgacgtcgccgagagaaagagcggcacctgcggtggcaccgggcctgtcaggtcgacgttgtcgcagactcgcacgaccgggaggagcgacgaccgctcggccgacggggacgacattcggttacgcaaagtagattcggcgctggcgaaggaggatgaccactcagcatcatcacggcacactagtctagtagttgaacttaccagtcgttcgagatgggcgagagacgatctgtacgaggcgacgcgaagagtagccgaacggaagcaggctcagcatcagcgcgaaggtccggccgccgcaaaagcagaaggcctgggcctcgcacgttgatctggatgatgagctgacagtgtcgtatgaggtgcccagaggtcaagtcgggtacagctgggttcagatggaggaagatcagggcgcttcggagcgacgaccggtctcgacgacgcgctctgttcgtttcccttgcacgcccaccctcagcttccgcctctctcgacctacataatccttggacggtcctctccctggaacctagacgctagaagacccggatcgcagctatcttcgagctcgagcgtcggcttgtccagtgttagcacctctcagtcgacccagaccatcttggccgtcgacgcgcgcctgctggccctcccggtcctcgccctcatcgctcccggctctctcgcctgctcagccttctggtctcctctgtcgtgagtcgcttgatagcgcagtacgtgctgcggccaactgctaaaatccgcgctgtcaactgtcctgtaagaacagctcgccaccacgccgacctccttccgagctcctcgagcccgccctgtccgcgatggacgtccctcctatccacctcgtcacggcggccatcacgtccgtgacgcttgccatgcgaaagaactcgcgctggtcgcaggcatctctgtacagcggcgtcggctcggcgagccggctcgctcacgagatgggcctacgtaccctgctcggggccgaagcggctgacggccggctgggccgagagggaagctcggaggagctcatggccggcttcgtcggtcttcgacggatggtcgtcgagaaccctggttagtctcaggtgtcctggcggtccgcgctgtgacctctcgcctcctccattttcactgaatcgaagctgatcctgctcccgtcgctgcccgcctgcctgccctcaccgttccgcagccgacctcccgccgctgccgatgctcatctcgccctttctcgccctcatccggtcgccattgaccaccggtccaatcacctcgcaagccctggcggcactcctgtctctcctcaccatcttcccgtccgagctgccggccgacaacgaggccgccgaggcagagctcacgcaggcgctgtccaacatctcaagcgccgtcacgcattgcaagttcgaggcgtccgactcgcagggcgacgaggttgtcctgctcaagatccttgaggtactcgacgtcctcgtcaagcgctggggcggccgcgacggccggacccttctcggcgaccgcgaagtgtgcgagatgctcgagaccgggctcggcatgtgctgccagatgcggctgtcgggtttgtccgcgtccaggatcttctgcagtcccagtctcggaatctcgcaaactgattttgtcgtttttaccacttggatacagagctgctacgaaggacggccgagagcacggtccagacgatggtccgcatcgtgttcgagtacctcaagacactcgagccacccccggcgagcaaacaagcggcagagccgacagcagacgccgatgccgcgccggcgaccaacatcatggacccgaccgggatagcccttgccgacgaaagcgtcccggagccgacgcaggctgctgaagacgcgttgccgccaagcgactcgtcggcgccaaaagcggagagcccgctcgtgtccgtctctatgcccctgctagaggagcctcttgagcaggccgtcgcgacgcaatccgtgtcctacggcccggcgacgccgactgagctcatccgcgtcctcatcacgctcttgaacccttcggacccccagcacaccgactcgatgcggctggccgcgcttggcatcctcaacacagcgcttgaggtagccggcacgcacctcggccgctggtccgagatccgcggcatgctctcggacgagggctgcaagtacctcctccagcttacgcggtccgactcgcccgccctcttcagcttctccctccgcgtgacgtccaccatcttcgagacgatgcgcgagggcttgaagccgcagatggagcttttcctgtcgtacctcatcgatcgtctcacgccgccgccctcggcgctgcacccgtcgcagcggccgatgtcgacgcacggctcgacgtcgtcgtcgatggacgccaacgacgaaaagaccgatctcgccgtggatgtcgcgccccgttcgcgtcacccagtcggcgttggtctcgcggccaatgccgagtcgcgcgagctcctgctcgagtgcctcgcccagctcgcgcggcacccgtcattcctcgtcgacctttgggtcaattacgactgtgacatggactgcgaggatctcttcgagaagactgttggattcctgacaagggtgattagaagggagctgcgagacttgcgcgagcgagtaacttacgccaagtactgacacgcgaccttttattgggacgacagggcatctacccgtcgcagccgaccccggggtacccgcagcaagtggactcgcaattcatctgcctcgacatcctgctcgccgccgtcggcaacatggccgaccgggtcgagaccggcggtgttacctggccctcggtgcgtctgtgcccggttgtgagtggcagagaagacgagacgcgcagctgacacttcacccctgacaaacagacgcacccgtccccggaggagttcatcgccatcaagaaccagaaacgcattcttctcgtcggcgccgcccgcttcaacatcaagcccaaggatggcctggcctacctcgagcagcacggtctgctcaaggtgcggccaggccagaccaaggcgcaggcgatcgcgaccctcttgaagacgtgccctcggctcgacaaaacgctgcttggagactacatcagccggcccgacaacatcgagatcctgcaaacgttcatgggtctcttcgacttcagtaatgtgcgtctcgctctgtaccctctgaccttcgttcgctgacccttacatcccctcctgcagaaatctgtcgccgacgctatgcgcgactttctcgaggctttccgcctgccgggcgagtcgcagcagatcgcccgcatcaccgagacgtttgccgccatctttttcgcggccaatcccggtgcgcaatcagctcgctcgcgtgaccagccttccttgcggtgtctgaccttgtgtctttcccttaggcgagatcaagtcggaggacgcggtttacgtcctcgcctactccatcatcatgctcaacacggacctcttcaacccgcaaaaccggacgcgtatgtcattcgaggactaccgccgcaatctccgtggcgtcaacgccggcgccgacttttcggacgcctttctcgtgggtcatgcagacaacctcgtgcctctgctgaatcgtccctccttgctgatcttcgatcgcttttatcgcaacctcagcacgaaatatacgactcgatcaagaagcgggaaattatcatgcccgaggagcacactggccagctcggcttcgactatgcctggaaggagctgctcgcccgtgccccgaaggccgggccgcttctttcgtgcaacacgtcggccctcgacgcagacatgttcaccgtcgtctcgaagcaggtcgtctcgtcgattgcctacgcatttgcgaccttcaatgacgactacatcgtccagcgctcgatccacggcttccggcagttggcaacgctcgccgtctcattccacctcccagaggtctttgaccacatcgtcaccgccctctcgcagagtgcgttctcaagccctcccgagcccttctagaaacatcagctgactactctccttatgatgatcagcgaccggcctgctcgatgaccgcgacccgtcgcaggcctcgcttaacaacccggtcgtcgaggtcgagggacagacgctgaccgtctctggcctctcggtccgtttcggcatcaacgtccgctgtcagctcgcggccgtcgtcctcttcacgatcgccaacggcaacggcaactttgtccgcgacggctggattcaggtgcgtcggcgtccgctcgggctcggcgacggtagtgcgctgactttgacctcgctcgccgatccatagatctttgagatctaccagacgctctttctccactcgcttctgccgaagccgatgctccagatggaggacttcctcggcggcacgacgatgatcccgctccaggtcgctctcccgccagaccagcagaagccgcggcagaaggacgtcggcctcctctcgacattgtcgtcgtacctcctcagcccttacggctccaactcagacacgccccgcgtcccgacgtgcaccgacagcgaggtcgaggcgacgctctcggccgtcgactgcctcaactcgtgtcggttcgaggagctttacggccagatcatgtgcgttcagtccaagcgcacctgcccttatctgctgcattttcgctgacgctgctttacgccgcctcgtctcaggaacttgaagcctggggcgctcctctctgccgtccgggcattgaaggacctcgccgaccgacgcctctctgcccaggctcagccgccaaagggcaacggccgtggacgcgacgcgccgacgatccgcgctggtgtgccctcagccgcgccgggccagaacgcgtacgacccggcctcggtcttcctgatggagatgctcgtcagcatctcgagccgggcaaaggcgcacgtcgtcgagacctggcgcgtccccttcacgtctgcttcactgcctgacctagaactgacaagcacgcttccttcgacaggcccctcgtcttcgaccacgtttcgcacatcctctcgaccgctgagagccacagcatcctgctcatcgagcgggctgtcgtcggcctcctgcggctctgctccgccatctcgagcgaggtgcgcttcggtcatttgacttcgatccaggaaactcctgctgaccaccgcttttcgtccaagcagcccgccatgcagcgccagctcgccgccgccgtcgacctcctgcgaacgctcccgccgagcatcctgagctcagtggtcgagggaaccggccagagtgccgaggacctcctccgcaagctccagggcatcgagttggagagtgttgcaacgcaggtttcggccgcggaccaagtcgagccggctgtccaggctgaggtgccgtcgggcgccgttgtcgagggagaggctgctgcggagcagattgaagagaaggctggtgaggcagccgttcctacgaaggaggcctctgtctgattggcttgcttccaccccttgccgtagatctcttgttatactttgctttgaccgttgctgtcgtcaggcaccgggtggggacgccagcaagtacggcaaaagggcctctacagtgacttagacgatcaattcttgattcttttcgaccggccgatcggctcacgcgggcgcgtgcactctggcccgcctcgagctcgaccctcgtcgactcccttaccagcctcgtcttcaccagctcgccactgctcgtcacgatggccctccgcctgttcccccagctgtcacgctctctgcgggccgcgccgcccggctcgcgcgccgtctcgcggacgccggagcagctcggtatcttcgactggatgacccgaagggctcagccccaggacgtcccaaacgtctcgccgcattcgtcggcaatgccgtccggccagcaggtcaagcctgaaggccccgacgagaccgctgctgctggcgctgaggcagagtctgcgcccccatcaagagcggaggaggcttcggtcgatgcttcctcggcgctgagctcgtcctccgagccggctgccgacgaggtgcccgtcgcctcttcgagcagcaagagccccggccagctttcgccttcagaggcgtcgacatcgagcgcagagtcgtcctcgagcgcagcttcctcttcctcagacgcgcctcgccctcccttcaagccgccagtcgccctcgacacgagccttttctcctcctccgccggcgtcaagatcacgtcggcctcgccccttcctcccgcgccgacgttgccgacttcgcctgctgcagctactgcctcctcggccagcgtccagtcgtactctccgccaccgccaccacctaaggcaccctcaccgcctcagccatcggccgacgagcgctgggccgccatcaatgacacgcgcaaagctcagctttacgcccagaacgcccgagccgggaacaagtactccggccggacgatgcacttccgcccgggcgacgtctcgcgcgcgattggccagattcagacgatcgtccggactaacgacatccggacggagcttgttcgcaacgagtacttcgaggcgaagccgctcaagcgctggcgcaagaagcgccagttctgggccgactacatcaccgtcggcgtgcgtcgctcttcgtcttgcgatccctctcttcccatctcgaagctgaccgcctgtatttgctcactcgcagatgcgggaaaacgtcagggccgtcaagatcctccgcgaccgcaaccagctcccgcgccgatgagctagcctccaagagataacggaaacggtgaccaggaagggttgacgggggttggcgattcgcgatcctcatgatcctccgcacacgattgcccaagcgaacggaagggtcaagaggcgatgcgggacggcggggggaagccgccctcgatgcgccgtttgggggtcattacgaccgcgggctctgtgccttcgaccgagacgggagaatcgaccgtcgaaccgaggacgtcgagcgtcgaaaaggtgccgccgcgctggtctgtcgctggagcgaacgtcgccgcttcgagcttgccttcgtttggcagaccgttgacttcagcggcctcaccgccctctggtagacctaggacggacatggctgacggcggcgcacggagcgcaatggccgcctcgcgcaaggcgagcacgacttcaggcgtgaggcgaaggtcaaagagctcgaagagaaagcggcggatcggcagccggtggtggttggttgagacgacgtgcagcgcccggtaaaagagagggattgaggtaagaagctcccgatgcgaccgcttaagccggtacagagccgagaacgacgaggacgcctggacgtggttgctgaggttgccaatcgcgagcaggacgcttcgctcgagcgccgatgtgcaaggcaaaatctggaaggagcctggctcgccgagttctgctggcttccacgatgggatctgcggcgacgatgcaccgttagcgccgagcggataacgggggtctcttcggcgactcacaaaggtaaacttggcaggatcagagggtacgcagaggccgatcggctcgcctgtcgacgagagtgcggcctcccagccaaactcgagcaggaagtctgcgcccgcggtcgtacacgaaacgagaccaaggatgaagaagcacgtcctggccgaagcgtaaaaagtgaggcgtcagaactgtttccggcgccccaggtcgcgacgtcactcaccctcggaccgagaggacaggcgactgttcggcgatttcgacgatagtctcaagcaggtcttcgtcttcgagaaaagggaagccgccggatgtggcgccgatactgccctgaagttacgcggccgttaaagccggtcagcaacgaaggccacctgagcgcccccttgcaaaggccggacgcacgactgcccagaggatgcttttgagtttgttaatgacgtcggtgtcggcggcctcgaggccgtgctggcggatgaactgggcaaactcggcaaagtgacccttctcctcgagcatccggcagccttcggccgtctttgttagttctccgtaaaagtgaggcggcgcggtgccatcgaagacgctggtagagatggcgccagtcagcacgaaaagtcagagccgcccagacagttgcctgccgctgacgcacacttggtcgtccgggtcctcatgctcggttggaaagaggatactggagacgtaggcctcgacttggacggcgtaaagctggttgcgctcctttcaaagaaagacctcgtcaatgcccagcacaaatcggcgcactgcgcggagcgactcacgtggaaccagacctccatctcttggtcaagataatggaccttgcgcaggtattggaagccgaccgaggtcgacagaaaccttcgtcgcgaagggacgtcagctacagcagcgaagaacagccagagtgtccatcgtctgaaggaccaacctgagcagcagcgggtggcccatctcaccgagatgatcaagaaagggccgcatccggacgacgagctcgagagcctcggtcgactcgcaagcctcctcgagaaagtgaaccgccatctcgcagacctcggatgagggatcgtacagctgcgtgatgaggagcttcagagtccactcgttgatctcgtgcgtcgagatgacgagatcgccgaggcgttgagtcgcgtagagccggatgtgctgcagtgggaaggatgtggtcgatcagcgttagaggacgcggacaggctcaatctgcagcatgacctaccatgtagctcgaggtgagcgccttggaaagaacgacgcgcgagtggccgtccctgggacattgccaagaggggacgtcagctttcgaagtagaacggcggaagatggcaaggcgcgcacgtcgtgtaatcgaggttgtcgatgatggccttgacgaggtcttcccgacttcggaggtcgctcaggtggtaaaagagcgtaaataacttgaagcgctcgaggagcctgggaagacggtcatgcgtgaaaatcagcgagggaacgggtccatggcgaaaggttgtggctgcacttgacgccttccggttggcgattgagtgtgccaaagagctcaaagtagccgaacgacaatgtctcggcatagcgctcctttgagaggaaagggtccgtcttgaagttgccctggtactagcgagcaaaaacagaagcggccgtcaggtcagcacttgcaaagcgagctggagtcgagcgtcagagctctcacctgatcgagctcggtcaggcagtcgcagagctgtggcaggagtgggtcgctggccaggaaggcgattccgtctgcgttggtgagcagcgtctcgacaagtgcgcagccgaggcggacccatcggaggttgaactgcgaagaggacagccaacgggtcagctcgggcacagcgcgacgataccttttagatctcggccggcttggcgccgtacctttgtccgcttgattgccgagaagcgcagattgaacggctggaagaacgcgagcagacgacggccaaatttggacgccttcagcgcttcctcgagccgtcgagggttcagtaaaggaccttggatagcctccatgatggcgtcaaagttccacttcgtgtggtcgcgtgagaggaggacctatcgaagagagtccggggtcaggatcgatgcggacgcatggcctgtcgacagagtttcgtacgcacgccagtgtcgttcaggagcatctggaagtaccggtcgtcgacctgcaggcccatccggatcttgacgccttcgacctgtcgctgcccgcgtagcagcgggtcaggaaccgaattggaccgtgctcgcttgctcgactgcggaggcgtcgctgcttgcaccttcgttcgagtccgattgagccggtggatggccgccagagccgagatcgccttgtttttctgcagaggtgagtcgagccgggcagcgtgagagaacagccgagagagcgactgcacataagagcgtggtcagtaacagcaagaaaagctggcgaacgatgacgcgcacctgagcgtcggcggccatgccacctgggagcagcttgttggcaagaacgagtacctcgccgatgagaaaggtcgctttacgcgacagaatgttgtcggcctcttcgatgacgtcgatcagagcctgtgaaggatagcgtccggtcaggaaggaagcaagcagggggggggtggcaagactgccagggcagacgcacatcgacgagcccagctttgagaaagatctggacgaggaaagagacatagtggtcgataagattgagcttttcgggcgcctgctcctcgccgttgccggtgccgtccgatcctgaggacgtcttgaggttcttcgagtaaactggggtcggagccgcagacgcaaagcgttagccgaaagctgtcggctgaaggtaacgaatggaaccggacctgtgagtcgccggttatcgaggaaggcatggtaccatgagggcagcttgattcggaagatctcgaagaacatgtcgagtagacattcctgtaggcggagttggcgggcgtcggcatcagctcacgaggagcagcccgcaaacgagcagagcagggtctcactctggtagacatgctcggtatgcgcagcgactcgatgagcgagtggatgcccgcgttcatacacaggtagatgacgcctgacggacgagaagactggcggtcagtcggcaagccgccgcaaagtcgtcagacatagtcgttacgcaccggtccatgaccgtagcatcgtcgaaaccaccttatggctggctttaaggcggttgagatgcgtctcgcccgagccgtagacgtccgtgaagcccgacagggccatttcgatgtcggagccaggacggagagcggagcgagtggccggagcgtcggcgacgaagaggaggacaagcgcgacagacggcgcaagctcgtgcggaccctccgaaaaggactgcagcagaacgcgcagggcgttcgatcgcagcagcagatgaacgtcgacgatcgctgcggaggccaggtggatcagcacagggctggttcagttcgacccattcgtgcaagacgcacctatctctgccagcgtctccaggacgattggccggaagccgtcgtcggcgttctctgcgacgctgacgagcgtgcgtacgatcgtgtcgctcagcgggatccgcacgccagccgtgcccttgcatgcggccgtgccctgcccggtcgaggtcgaaggaaaggctgtgagcgcgagctcaatcaccgtccgaacgagcttgagcgcttgcgtcttctcggcggccgacttggggtcgcgagcgaacgttctgaccccgagtagattgaaggcgccgtcaatggctgggccgtacggggtcgctcgacgtaagataagacgggacgcaccgaagcaagtaccatccgacgccgagctcctcaagccgggcccagccatcttgatcgaccagtagccagcgcaagactcgatagccgatcgcgcgaacctccatgtcggcgtcctcgctcagcaggtcgagcactctgtcgacgctctggccgctgcgcccgagctcccatcggacgcggaggttgcgacgcaggttgtcgacgagcaggttcccagcctggatgacgtcgttgcgcgaggctgtcggcgagccgagagcggccaagtgcccccgggcggcggccagcgctgtgtggaagtcctcatcctgctgcggagacgacccgctgcggcagcgcgcgcctggtccgaccgagtcgctgagcgaggcaacctgctggacagctgtcgtcgaaggaaggcgccgtgcagacagcttgggagcaatctgggaagatccggaggagagcgcctgcgctgaggccttcttacgcaagagacgagagacgtctgaactccgcgcagaggggtcatggggccgtcgcaacaccaaagtcgcatcagccgccgtcgatctcgatctaggtgcgccactgagaggtcccagcacgcaccaggattcgacttgaggtcggcgagctcggcattgaggccggcgatcttgcggtcagcggccaggagctccgtctcgacctcacgtcgaagggctgagcgctccgagccgttcgcgtcgccctcgaggacctgcatgtcaaggtgcgtcagcatgcagctggacctgaaagggaagagcgagagaccgcgcacttggagaaggttctccgccccatctttgatctagtgtaaggggggggggggtcaaaaaggcggttagagcgtcagccgctggtcgtccggacgacaggcggagcacgcgccttggtctcgatggccagcttgcggaggacgagctcgaggcgctcagacgcggtcgtctcgccggccgactcctgttcgctcgcgccgcctctcctgccggacgacgatgggaccggcgtttggctctgcgagcgattgctggcctggcgggcgatggacggtgccgagagcgacgagctcgccgttcggaacgagtcgtccgactgcgagtgatggaagaccggcggctggggcacagcctcgagcggcgaagcgatggagccgttcatgctgcgaccgctctttctcctcgggtccgggcaagggtcggggtgcagctggctagggaaaggaaggggctgttgtcgactcggagggagagactggagggcaagtgcgtccgcttgggcgacgcgcaggcgaccagatcgtccttcttccgacctagcgactgcgaccatctcttttacgctcctcccttgaccgccttgcttgctgcagacatctcggacggcctactggatcagcctcgctcctatgatcgtcgtagccaggcgctcgttcggccgggtcgcggtcgagtcggcgcatgctcggagcgccgtcagccggcgagcagccgcaacctcgtcgcccgtcaacgccgccttcccgccgcaaccggtcgacctgcttgagatctatcgcgcagaggtcgacaagggagcgcttcaatggaacgacgagcaggtccgcgtcgttgttgctgtgagtcgtcctcgccttccatcttgcatgttgggcctgctcgctgacgtccctggatcggcgatcgtggggggcagctgcgccatgtcttccgccggctgtcgacctatacgccgtcgcctctgctactaaagactgtccagccgacgccgatcgcggctattccatctcgctcgctgctcggcagcttctggccgacgctccagcggcgcaagacgtcggccgagctcgagggcaacgagattgtccgcttcatgtcgattgaggacgagattcgcggccttcccgcgccgatgggcgtgctgctcatcggaccccctggcacaggcaagacgcggctcatccagctcctctacgacgctctgcccgtcgaaaggaagctcaagcggcattaccattcggtccgcccgttatgctgcggcgtcgtcggctgggcatataatgtggctgacgcctcccaacctcgcagttcttactccagatctatcgtctcatgcacgaagagggccagcgaaccgcgcaaggcccttacagcagtgctccgacctcgagaaaggatcggacgtatgacggctggcgccgcgaagacgagcttgccttcaaggtcgccaagcgactcatcagcgaagagggctggttgatcttgtgcgccgtcaacctgttccatcagtcatctcactaacgctgacactcgcaagccttgtactctgtcgcagcttcgatgaactccagctgacggacattgcgacggcaacgctcgtccaaggcgtactgctccacttctggcgactcggcggcgtcctcctttcgacgtcaaaccggctgccatctgacctttacggcggcggcgtccagaagaaacggatcgagagcttcatcagctgccttaaggggcgctgcgacatgctcgagcttgatggcggtgtcgactggcggcggcgcgatggccggccagggctcgcagagggcggcagctggacggtccacgacgagggaggcgctgggcgcgaagcctggactgctggctgggagcgagctgtcgacggtcggccaagtcggtcgctcgtcttatgcagaacattcgacgtttgtcactgacgcgcgtttctgatcgcccagtcgtcccgcactcgctcgtcatctacaacaggccgctcgcgatcgcacggcagaccggcaccgcggccgacccgccatcaacgcgagtcgctcactttaccttttctgagctctgcgaaaacgtacgtctgccggccctctgccatgtgtttctgagactcagggttgatcacctttgctgccgaccgtaggctctcggcacggccgactttttgtccatttgctcgtcgtacggcaccatcttcatctcggacgtgccagccttgacgttgacgaagaagaacgaggctcggcggctcatcaacctcattgacgcgatggtgcgtgcgccttgtctagcgcaatgcaagtatcgccttctttgacactgactttgccggtcgctcacacgttttgcagtatgagcaccggatccacctgcacgtcctatcggccgtaccagtcgacggtctcttcttccccgacgcagccgacaagaatggacggactctctctgagtcgctcgaagaggaggccctgtccgagatgctcaaggaagtcgatgagccgacccggccaaacgtgtcggtctacgagctccaaccagagagccagcagaccgttgttagaccggcggtgcgcgtcactcgcgacttccgtaacctctccatctactcgggtgaagacgagaggttcgcctttgtacgtcgccatcctcctccgcacacatcagctgaatgccgacgatggactgacgatccttatttcccgccgacagaaacgggcgctctcacgactgcaggagatgaccaacccggcgctcgctcgagccgagcacgagccgttatcggcggcgatgcggacatgggagacgccatcttctcggccggtcggccaggcagtagcgccgcgcgaccggccagtggccgacccagcgtccgtcgacgactttgcctctgaggcgtcgtacgacaccccgacgacgcggtcgggcgggccgcgatcgcatgcgacacggatccggagcgaggcccacttttggggtctgacggagcccaaggccaagcgagatccttagagtcggatgcccatggtcttgtattacacgatcagaaaggggggaagggaggcaggaggcgcgcgagatctagcagcgcacgagacgaagcgcgtatgaggaggtagagcaaagggaggagaaaggcaagcagattggtaagagggttcgtgacggcagagagacgagggtttggaggcaaagaaagagcagagggtccgtgatgaaagggaaaggggagagagcgccaaagtcgcctcattcgcgcccaagctccctccagcgtcgctcgcgctcgaactcggcccaacgctgcaagcagaaaagtcggggcgatcagcatgtattgcggtcgagcgcggcgaggaaggaaaagggacggaccttcataacgatctgcgacgagtcgaactggccctccttgtcgccgtgcgaggccgacttgacctcgccctcgaccttgcgggtctcgccccaggagaagtcgtccatgttccagtaactgtaggccgggaggacgaagttccaaattgggagcgagatcaggtagatgagctgtcaaaggagtacggggcgggtgtcagtgccgggcgcgacgtcagagatgtcggcagagacgtaccatccagccgacgtagctgatcttgcgactcgtaatgacaatcaggaggccgggcaggccgagaatgaaggcgagcaggatgagcgagagcgtcggcgtcggctgcgacgggatgatggcgatgacgatgatgtagatggtgaaggcgatggcggccggcaggacgagcgtgccgacgagctcgataaagacgacaaactggccactgaaggagttgaagggatcgaccgtcagcagctcctcgtaggaatcaccggccgagaggattagagagacggacctgaagcagaacgtgccccagaagtcgcggatcatgacgaggaccgagaggttgtggaccgtcgagttgatccaccgtcggcgctgcgagaggagcatgcggaacgtgtcgggaacgaccgtcttgcagacggcctgcgggcagaagagcatcttgcgcttggggaacgtcttgagcaggagggtcgacaggtaccggtcctcgccgagcagtaggagattctctgcggggagggaacagagtaggaggacggtcagcggacgatccatatagacgccgcgaggttggcctcctggaaagacgcactcttgtgcagcgtgtcgacgacgttctccgagtagtcctcgataatctcaggcgaggcgaggatgggaatccagtagccctggcccttggccgccttgatccggtacatctggcgatgggcaagcgagggagcacgtcagcaaatgatagcgtcgagcaaggaagacgcgcggaagggcgcaccgagaagcagccgggcaggcaggtgaccttgccgagcgtcgcctcaaacgccttggtcaggtggtgcgagatatagtactcgaagactgcacaagaaacggcgtcagcttgcgagatccagtcgtagtcccgacagaagactggcacgcaccctggatcatcgtcacccaggtctcggccttgttggcaatcttggtctcgccacagaggccgatgatgtcggggtccttgcgcatcgtcgcagtcactgagggaggcaagatcgtcgtcagcacgggccagtcgtctagaggtaagcagacagagggcgtactccgggtgagcgagtcggggaagaccttggtgtcggcgtcgacggcgaggacgccctcgtaaaaggacgggtggacgccgctgatggcccaaacggccttgaagagctcgtactcgaacgtcgtcatgcgctcgtcgtagaggaccttctggaggaaggccatcagcatcacctgcgagtcgcgcttgccccggttgcccggcttggcgtcctttgcctcgagcggcgtgccgaccttggcgatcaggagcatcggtacccgctgctgcttggaccgctcgaccgtgtcgtcgtcgtagtcgtagaagccggcgtagactttggccatgttgtgcttcttgtagccgtcggcgatggcgacgtacgagtggggctcgacctcgtgggcggggacgaggagctccttcatcatgccgaggcagatgtcaggcgtcgggaggagcgagcccgcgcccttgaccatgccgtcggcaatgacgaggatgagcttgtgcgagttggggtagtcggtcgtcgcgagcgagtcgagcgtcgtccggaggccctcgatcgactccgagtaagcggtgacgagcatgaactggcgcatgagcgggaaaccgaacggctcaaagtcggccggcggctgggggatgagcccgagcggcgtctcgaacgggcagtaggcggccggctgggcggcggccgaggcgagcatgccgccgccgtgcccgccgttagacgagtcgtagagtgagtggccgatcgaggatcgctcgcggccgggcgagctcggcgacggcgtcgtcggccgcgaggcagggctcatgaacgggtcgagctgcgacaggcctgactgcgaaaagcgccggttggggccgagcgatgaggccgtgtgcgacttcgagtagccgtacggcggcaggccttgcgatgacgcgagcgagggcagcatcgagtcggcccgcgagtagcgcgacgtcttcgggagcgcaaaggccgactgcttttcgcggacgttcggccggtatcggcccggagccggctggtagatgtcatttgtccagtcttcgatcgcggcgacgcgcgccttgcgctgagccgacgtctcgccctcaaagtcgccgagcttgcgcgagaggaaccagccgaaaaagacggccatcgcaaacttgaggccgaccatgccgaggatgacgatgagctggagggagggaagggggcggggcgagggtcagtgacctgctctctcgagcgccctggcagagacaggcagccaggccgtaccgaagcgtagagaacgacctgagaggccaggcagccaatcgtgagactgtcgatcgtgccgatgacgatgatgtcagacaggcagcgcatctccttctcgtagccggcccgcatcgagtacatcgctggcgagcgcatgagcagaaggggtcagcactcgagcaacgaaaggccacccttgcaaagagacgacgcactcatgtcggttccgcggtaggtgccgttgttgcgaatctcgtcaaaaaacttgggccagcggacctgggtcggctgcagccagttgaggagcgacaggtcgaggaccgagctgttggggaggaaaagcgaccagagctcgcgtcagtcttccccgcgctcgggggcgagctcgtggcagagcggacgcactcctggtagacgacgaggttccggcgggggtcatggacgtcgtcccaggtatagtagattgagcccgactttggcagctggttgtactggtcgcgcgcgcccgggccaatgtggcacgtgtaagccgacgttgcattgtttgcattgacgttggacgattggttctggggccggaggttgcacggaaagtaccagccgagcgcgccgctcgcgtcgtcgacgaccgagctcccctcggcctttgtgatgagcccgcggcagttctggttgacgttttggaacatgaagctcgcgtccatcccggccgcgttccagggctcggtgtagagcgggttctgggtgccgttgaacaggccgacggccgggtggccccaagtcgagaggtcgtacgtgaagccgttgatgatgagcgagcccgtcgaaatctcgccgccgtggacgcggttaccgggcgagccgcagacggtctgcgtaaagccgaacgtgaggaagccgacgactggcaggcgcggggagggaggaagaaagcggaggtttagctggagcagcgaagagcgagcgggcggcgggcaagtgcagccgagacgcacaagccatcaggagcaaaatgatcgaaagcaggcccatcttctcacgccaggcacgctgcgcctcgggcgtgcgcttgcctgcgaggtcgaggagggagaggagagagggcacgggtcagctcgggtcgggcgtcgtcgcgcgcgcgagtatggaagaggagcaagggggcgcaccaaagacgccgcggaggacgaagcccgggacgaggcacgtcagcagccagcagtagatcatccaccagccgactgggcccggtgcaatccgattccagaagcccttgcggtcgtcgtcttcgacgggcgcttcgtgctgccggttcgctcggcggccgctccgcgtccgaccgggcagctcgtcacccccagcgccgccagcagtagcagcggcattcttgcggcgtagcgtgttacctcgcttgaagagggcgaggcccgactcgctcccggcgcccgacgcctggtcctcgtcccgggcgaggatcgacttgccccgccggagctggggcggcgcgctcgacgacgggataggcggcggcgggcccggtgacggccgggggtgccgcgggtcctgcgtgtacatgcgtgcgtgtgggcggcgggaagagggcgagtgccggcaagcgacgggcggatgtcggctggcgaggcggcggaagggaggacgaacggagggtggtaccgacgacgacgggccggcggggagggaaatgaagcgagcgctgtttgtcaggcaagaaagggcggggtggcggtgggcagcagggccggttgatcggtcctcgggctcgggtgtcgggtgtcggagcaggcggcgtaggactcgcagagaagactagcgacgacgacgagaggacgctaccttgaggacgagtacgggcggtcggagagaagcagcaggcaggcaggcgggcgggccttcttcgaccgacgcggcggtggcgcgcgcgcagtcgatcgacccgccagaaattaaaagagcccgccggccagacgtcgaaggctgagcggcacttctcgtcctcgagggacgagcatgtcatctgcctggctgcctgcccgcagacgctactgaccctgtcctccacgctgcgacaagcgacagcagaacgcagcagcagcaagatgctgacgagtacgactcaccgctgccgccagccattgacgcgcggcctgctgaaacgtcggccccgtgttgatcgacctccctctgttgctgtcggccggtcgctcaccttcgaactcccagccgacagcgagccctccgtcacacggccgggcgggtcatgccgtagccggccgcgcgagaaaaagagggggttccggcgcgctcgtgggctctgagagagaggagggcgtccttcttcagccccctctctctctctcctctctccgaacgacgacgccgtcctccctccctgtcgacctcttcccccttgagaaggccgacctccctctctctcgtagagcgcccccctctctcgtccattcttccctccgacctccatcttcctacctccatctgcctcgcccgctcgcccgccgactgccgactgccgactgccgtgccttgcggccctccctcctcgtcacgcctacctcctcctcgtctctcagcccatcttcagcctcaatctcgaaccgccacgtgtgtctcccatcccctcgacgcccgtctttcttctcctgcctggccgaactgacggcgtcgcgtctgcctcttgcaggcaccccttccgtcccgaccttctggggccaaagcgcgcgggcctctccgcaaagtcagacgccgccgccgccgccaccgccgtgcctgtgccccccagctcgtcgctgacctcgacctcttctcctccttctccagaccaccatcagctgctccttggacgatgtccgactcgtcggccctcagctcgcccagctcgagccatcgctcgcttccctggaccgacggcaagtcgctctcatccgccccgtcgtcggacggcccgactgccgccgatccagctttggcttctgctgacgacgacgacgacgacgacgacgacgacgacacccgccgactctcgccctcggtcgtcgacgcctgtgcggccgtcgccctctcgtcggcgtcgtcggcatcgcaccggtcgactcaccggccagtcctcggacgaggccaagctgtgcgtcgactcgactcgtgtctgctctctcagctagcccggctcacggctgacgcgaccgttcgcctccccccccccccaaacgcagcagccatccacctcggtagccctcccctcgcaagccagcatcctcccctccggccctgggggcttcggccggcaccgcggcctcctcctttcacgtccgacctccgcccaagccgtcgagcctcgtcggacgtcggccccgctgtcgcccgccgccgccatcggctcaccagggaggccgatgacgcgcctccagcagcagcagcagcagcagctccaggccgctcgggcgccgagggagcagctttcgggcggccagtctggggcggcaggccagaggccgacgagccgtcatccggctcagacggcgacgacgacgacggctcggtcgagggcggccgacgctggcggctcgctctcctcgtcgctctcgccctccctgccgctcgtcccggcgactcgccgtccggcgccgatggtcgacggcagcgccgagcccgtcctcgccccactcgctcaactcgacgccgccgccttccaccggtccgaccagcgccgcgccgtcagcgacccgacgctcttcgacggcgggctcccgacggcaatgcccgcgctctttacggcgcggccttccctcggaccgccagctgcgatccacgaggggaagtcggtcgacgagggcaacgctgacgacgaggacgacgacgggccgttcggccccggtcggtcgccctcggcgctctttgacggaacgtatcaacctgcgtaccaccatctccaccagcagattcacctcccgcggccgagcacgcagcaccctcatcaccggcagcggctcgacgtcttcaacgaccaccggccaaggtccgtcagctcgccctcgtcaatcggaccctaccggggcccatcggccgactttgcgctcgagcacggccagccgccgccgagctacccgccctacccggcgccgtacagcttccatcctggctacggctacgccgctggctacccgtacggcccgtcgccgcatgcgtactcgtacgggccgtacgacccgagcggcctgcatggctatggcccgccgccgccgagcgctcaccctggtcacccgcctacgtccgcccagagctggcagcaccagcagcagcagccgtaccacccttcgcaagctggcggctactggcggccgcttccgtttgctgggcccggcagcgccggcgggtgggggtcgcactttcctccgccgggcgcgtactacccggcgcagcacgcgcacgccgaggactcatcgtcaacgcacgacattgcgcagacgccaactgagccggcctaccctccagcgccggcagaccagaccgacgtcagtggcgccggcgccggtcagtcgtcggtcgacccgcatgcggttcagcaacagcagcaaccgcagcccgagcacgtcgtcggccaacgctcgtccgtctcgccgcatcacgcccgctcgtcgtccgactggtcaacccactcggtcgagatccccggcgggtcggccgctcaccccgtctcgatcgcgtcgtccgagagcgtcgacatcgacgtcgacgtcgatcggcgcgagcggccgagggcggccagcagcagcgccgccgccgctgctggccgtcatcagctcgtccggatggacatgaccgactcggacgacgaggacggtgctgacgacgcaatggacggcgaggtcgagtacacgtacgagcatgtcgaccagccgccgacgtcgctttaccagcgccggcagcagcggaacctcggttttggccagggcggccctcctcctccccaagggcagcatccgataggctacgcgtacccgccgtacgcttacggtcctccaccgccgacctttgccttcacccacggacccagtggcggcgccttctacccggcccacgtactgccgccgcccgctgcgaccgctccggcattgtcgaggccggcgtcgacgaccggcctcgccgcccgacggagcaagtcaaccgtcctccgcctcaagctcgcctcgccgacgaccaagacctcgtccggcaagtcaacggcgacctcgaccgcgagcggcagccgatcctcagccgtcctctcgggcggcgtgacaaggaagcaccggccgtcgaccggcggccagcggaaaaacgtcacgctccggccgctcatcgtcccgaacctgaataagccgacgcgcggccgggcggtgccgaacgacccggacgaggtccgcaagcggcgcgggaacgacaaggcaaacgtctatacgtgcccggcgaccgactgcgggcggtgctttgcccggccggagcacctgaggcggtgcgtccccttacctaagcgaactgctttgccgaaagcgcatactgactcgctctttttctgtccttgctcactctagacacgctatctcgcttcacacgcacgaaaagccgtacgcttgcgaatttccgggctgcgtcaagcgctttgcccggggcgacaacttgtgcgtccgagctgccctccgttgcgctgtcgtctcttgagctgaccggcgctcccaacttccattggtgtagaaagcagcacttcatcgtcgtccaccgcgaaaagccgatccagcgcaagagcaggaagagcaagaaaagcagcagcagccaagccagcactctgactgtgcgtctcgcacacgtccggccttctttctgacgcattccgtgctgacgagatcttccccttctctcagcctcagccctcctcctgaaacgcctgatcatgaggaaccctcttcccggctcgatctctaggtcgtcctcgacccattccccccgatacccgggccatcggcctcatctacttccattccgcccgccgcctacacgacctcgcacccatgccctcgcgcctcgcttcctttgcttttttctcttcaccacaccgcactctctcccttgccttcgcacgcactcgcacctttgctcccctccgtacttttcccctcatgaatttccgcttcgcccttctcctcccgctgcagaacgactctacgacccgtctctaataattccgcgctcaaactcctctacgaccttccgctccgctgtagcccttttctgaatcgtccacttctctctctcacatgccttgatcttctccgtgatctctagtagtagagagggaaacgtggctcgttcgtgggtgcgcccgccgcgcagcgaatcgttcttctcgctcgcgcctccgaccaccacctctctcacctctcccagcccagctcgtagcatgtcaccttccacctcgtcgacgccgacctactcgcccgacccgattaacgacctcggcccctcgtcgtcgaccccgcctgaagcctctctgccgccttcgaaccagcagcaacggccctgcctcgcgcagcagtcgctctcgccctcgccctcgctgacggcgccctcgacgactcggtcggtcaaggtcgagcgctcgtcgcaggctatcaactcgaacatcgttgccgagagcgaacccgtcgaggaagagcggttcgaggacgccgaggaggaccttggccggtcgaaagaggaggaggagcgggaggtcgaacaagtggtcgcgagcgacgacgaagaggtagacccgccggccgacacgctcgaagacgagctggcggttgagcagtcggacaacgacgattcggccgagaaggagaaggaggcggaagatgagtggaaaggccttgggcccgactggaatgaggagcggctcgaggacgaggtgcgcttggtcgactctcctcgtcctgcttcgtccctgaaccgcagcccgagccgacagatgcggccgctcgatgtcgacgcaacttttgtcgagcctctgcaccagtatcaggtccgccaggaagatgtccttcaaagtgcgtcaggacacctgccgcatccgcatttgtgcatttgccggctgactcttcttgacccgaccagactacatgcgcggcatgtttggaacgatgctccggtccgaaggtgcgcatacacccctctttcgatgctctctgactctgccagccacccgagcctgatgacagggtctcctttctccgtcgcaccagtctgggcaacgacgtgcctgcgcaagcaatccgaggcgtacgctcggcatcttgaggagtctacgacgcggatcgccgacgaggaggtctaccagggtgcgtcggacgtctcatcaagcacctctgacgctactctcacactcgttcctccgtgcaaccggcagaaaacatgcgccagaacctgctgcgcgtcaaggagcaggtccaggccgcgatggagcacctcgccggcatgcagtcgctcgctctcgtccgggtccatcagcggagcgagtcggccgagcctcggaacgtgaacgagcgggcccggaaaaaggtccggactcagtgaaaagggtcgtgtcggttgacgtaagtgcacgagcttgcggtagacgatccgagctgactccctcatggcgcacctggcggggtctttggtcggctttcgcaacagaattgctcctccagctgctctggcaaggccgtctacactctggctcgtcgaccttgcaggcttgccgttgtcagcgcgggcagcgctcctctgtcgcagcagcgcagatgcgacccatagcctcatatctcgtcctctttcattcgctcatctcccacgcccagcccgatacatgccctctgctgtccgaactcgttgccgtctctgcgattgacgggccagtgttggtctgacgagtgcagttcgcgaggccgaacagacggccggagcggctgattggtaagcacgccctccgcgccgggcctgtttctctctgctgccatcgcgcgtctcgccctcctctcctccttaccccttccgttccttctttcgacgtcttcttcgcacctatttgagccaggtccgtcacttgctcgcttattcaccgtaggttcgacagtgccgctgacaacttgcatgctccggggcaacactggctcatgcgacagcgccctttcgccgctcgctcgctcgtccctccttccgcggacctgccttcccatctcgcctagcgcccgccctcccttgccgtcggacccgcggactctgagaaggctcgcccagcatgcggatgctcaccaaggtttgtccatacttgaacatcttccgctcctgccgaacgagcccgcgagttggctcgccgctcgccctcgcgccgagggctgagatctcgaacggcgtgctgaaccctccgacgtctccggtcactctgcccctcagttcgagtcgaaatctccccgagtcaagggggtcgccttccgtacgtgcctggtcatctgttgctgcttctttgaagccacccgtgtgacgtctcaggccgttcctgacctcgccggctgctgcctcgctccctcgcttgccttcacagacccaaaacagcccctgctggccgcctcgcttcacaatggcacgatccagctctggaactaccagatgggcacgctcgtcgatcgctatgaggagcatgacggttagtccctacttcctgtggtcgtcacagctctggccttggctcgaggacgcgccgcgcaggtcggcgagctcgcacgccgccggccggtacctctcgaccaagctttgccctcggcgacctctctctgtagcacagtgcaaagcgctgatcctcgtccgacggctttgtctcgtaactatctgctaggcccggtccgtggcatctgcttccacccgacccagccgatctttgcgtcgggcggcgacgactacaagatcaaggtctggaactacaagacgcggaaatgcctcttcacgctcaacggccgtacgtaaccctcctccccccctttcctgcttgtgagccagccctgtgtgctgatttcattctcttggactcggccagacctcgactacgtccggaccgtcttcttccatcacgagtacccgtggatcatctcggcctcggacgatcagacgatccgcatctggaactggcagtcgcgcaactgcattgcgatcctcactggccacaaccattacatcatgagcgcccaattccacccgaaggaggacctcgtcgtctcggcctcgatggatctgacggtccgcgtctgggacatttcgggcctccgcaagaagaacatgtcgcaccagccgatgtcatttgaagagcagatggcccgggcgaacgccggtcaggccgacctttttggcagcacggatgccgtcgtcaagtatgtgctcgagggccacgaccggggcgtcaactgggcctcgttccacccgacgctgccgctcatcgtctcgtgctcggacgaccggcagatcaagctctggcgcatgtcggacaccaaggcctgggaggtcgacacctgccgcggccacttcaacaatgtcctcgtctcgctcttccacccgcggcacgagctcatcctctcggcaggcgaggacaagacgattcggatctgggacatgggcaagcggacgccggtccagacgttccggcgcgagcacgaccgcttctggagcttgatcgcccaccctgagctcaacctgtttgccgccgcgcacgacaacggtgtcatcgtcttcaagctcgagcgcgagcggccagccttctcgctctaccagaacacgctcttctacgtccgcgacaagacggtccggatgcatgacctcgtcagcgggtctgacgtcggcgtcatgagcgtcaagaagctcggcccggcctactcgccgccgctgacgctgtcgtacaacccggccgagaaggccctcctcgtcaacgagggctccgacggcggcatctttgacttcttccgcctgccccaggacggcgtcgtcggcgactcgacgactgacgccaagcgcggccagggctcgtcgatgctgttcgtcgcccggaaccgctttgccgtcttctcgcgcacggcccagacgatcgagatccgcgacctgtcgttcagcacgaccaagtcgctcaaggtccccgtccagacgaacgacattttctacggcggcaccgcctgcgttctgctatcgtgcccgacctcggtcgccctctttgacctccagcagcagaagatcctgagcgagctcacgacgccggccgtcaagtacgtcgtctggtcggtcgacaacagcatggtcgccctcctcagcaagcacagtgggtcccctttacttctcgagccttgtccgcccttgtccgctaacgagctacccccttcccccggtctgcagccatcacgatcgccaacaagtcgctcgagcagagctgtctcatccacgagacgatccgcatcaagtcggccgcgtgggacgactcgggcattcttgtttacacgacgctcaaccacatcaagtacgctcttccctcgggcgacactggcatcatcaagacgctcgaccagcccgtctacctcgtccggatcaaggggcggaccgtccactgcatcgaccggagcggccggccgcggacgatcgacattgacccgaccgagtaccgcttcaaggtggcgctcgccaaggaggcttacgacgaggtcctccagatcatccggacctcgaaccttgtcggccagagcatcattgcctacctccagaagaagggctacgccgagattgcgcttcactttgtccaggacccgagcacgcgcttcgacctcgcgattgagtgcggcaacctcgaggttgcgctcgagatggcgcgctcggtcgacaaggttgacgtctggaagcggctcgcggcccaggcgctcaagcagggaagccacaagacggtcgagattgccctccagaagactaagaacctcgagcggctctcgttcacctacctgacgaccggcaatacggaccggctgcggatgatgcaggccatcgccggcaagcggggggaccagatggcacgattccacaactcgctctacctcggcgacatacaggagcgcgtctcggtcctctcgcaggtcggcatggacccccttgcttattgggccgccaagacggccggccttgaggacgaggcccaggcgatcctcgaggcggccggcatgaccgaagacgatgtcccgcagctcggtggcgcgctcgcgtcgtcgtccaagctggcgccgccgcagccgctcaacccgagcttccggcaggattggccgatccggccgattggcgactcgttctttgcgcgcgcactcgccaacggccacggcagcgccgagcaggcttcggccctcaccggcgaggcctcgaacgagggcgcggccgagctctctgcttggggcgccgacaacccgctcgccgtcgaggacgctgccgacgaggacgatgacgaggagggcgagggctgggacattgacgtcgacatccccgacgccccggtcgacgttgctgaggcagacgaggtcgaggaggctgtcccagaagacggcatggcgcccggcacgagcgagagcgacatttgggtccgcaactcgccgttagccgctgaccacgtcgccgccggctcgttcgagacggccatgacggtgcgtagctagcctttcgggagcggtgtcctcgatgcagccaagctgaccccctgacctcattggcccccggaagctgctcaaccggcaaatcggcgcgacccacttcgagccgctcaagccctacttcctttcggcctaccgggcatcgcacgtctacgtccagggcaacccgtcgctcgacccgatccagctgcacgtccggcgcaacccgaacgcaactgcgacaaacgaggtcttcccgacgatcgccttcacgctccaggccgcgcaggcccaggtccaggacggctacaatctcgtcaagaagaataagattgccgacgcgctcgcgacgttcaagacgatcatccagacgtcgatgcttgtcgtcgtccagtcggatgcgcaggagagcgacgtgcgtccttgcccttactctcggctcgcaatgcgctcggccagagactaacgtctcatcccccaatcgaccgccagctccgcgaggtcatcaacaccagccgcgagtatattctcggcctgacgatcgagctcgagcgccggcggcttgtcgccgaggagccggagagcgtccagcggcagctcgagctggccgcctactttgcgcactgcaagctccagcccgtccaccagcagctcgccctccgctcagcagtacgtcctagacggccctttccttcgcagcgacctgtctctgaccagtccgcttttcttttcgcagatgggcgtctggtctaaggctcagaactacgcgacggcctcggtctttgctcgccggctgctcgagctcaatccgcccgacgctcggagtgtgcagacggtgtgtacttgactgcgagccgtccgtagtcccccttgctgacccgtcgccccttgactactcgcaggcccggaccgtcatctcgcagggcgaccggaacccgcaggacgtccttaagacgtcgtacgaccactttaccgagttcgacatctgcgccgcctcgctcacgccaatctaccgcggctcgccctcggtgacgagcgccttctcgctcgcgagctacctgccagagtttgctggctcgatctgcaaggtcgacgacatcgtccaggtcggctttgtcggcagcggcctccggagccgcgtctagaggaggggaagcagaggggatcgtgattgcaaggctgttcttttcatcttctgcgcatcgtaaggagtgtcgggcgcgtgctcatcgacagcgcacttgcttcatcgcgcattgtagcgctcgtcgccgaagggtccgtcgtaggggtcctggaacgcccggcggtcgaagtgacggcgatcgcggccagtggccgtctctgcgtcccagcgccggcgcaactcccactcggcctctgcctccctgcgaccgaggccttggccgtcacggtgagacgactgcggccagtactcttcacgccaactcagccctcgacgcccgtcgtcgtaccactcatcgtcgtctggccatccccggtagcgcgaacgagcagggttcgcgaccgagggcggcggcggcagctcgtagcgggaccgctcgtcaggtgaccagcgatcgcgagcgtacgggtccggtcgggggtcgcgcaccgaaagcgcttcacgcattgtgtcaaactcgtacgcgtcgccctcgtatgtcggccgatggcggacgtcgtcgacgtattccgggtggtgttgctcgtacgtcggaggacgacggtgtggggacatgccagcagggtatgcgtcgcctaagtagcgctcgctgtccgtcccgtacctcggaacgtcgggcgtcgggcgaaaacggcgtgggtcgagggcgtatggatcagacgagagccacgttctgccgcgctcggcgtgccgtcgtcgacgcagacgacgttccatctcgtcggccgggacgtgcgccggcggccgacgggagtagtacgcgacttcctcgtcgtcgacgatactgtcgcctggatagaccgtctcgtcttcgccagggacgtgcaggccgacttcacgccggcggtgggtgcgactcggcgtctgaagtttgggagggtgccggcggaaaagggctgcgagagcgtcgtcgtccgggtggtaatcgggttccggccgaggccggcggtaaggggccgagctgcgatgatagttggtctcttgtggcgggtagaaggtgtagggctcgtactcgtcgaaccagttgcacgggggataggggtgaacctgctgctgcagacacgagaagcagccagagagggtcagcgcacgctacgtacggttctagtgcgacgagatgctcttacagcccctcggtgcacctcgtagcgccagtcctggtcgtcggagacaacccggtgtcggccgtcccggcggtgacggccgttgaaggtgaggtcgtccggaggaccgactcgccgccgttgttcgtcatagcgtcgtcgatcgtccgtccggtcagtcgcatccccacgcccaaagaggcccttgaccgagtggaggaagcctcctccgccgccagacgaccgagtcgcatcccggccagagcgcagcagctcacggtcgtcttcgcgatgtcggcgagggcgttcgcggtcgtcgagccgattatcgcgcggcgagggtcgtacatgagcctcatcggatgagtgggcacggcgttgccttgaagtaggcggattgtgatccggcagctcgactagagccggcacaggaggcgtcaggagcgagtcgaaggaggtcaagcgagatgggacgcactgagcttgagcggctcccgtcggacgactgctcctgcttgggatggcgatacgaaggctgctgaaggacgagggctgggtgtcgggctcgtgcgtggaagaggcggcgggagaggcgagccaacccgagaggcgttggccgatcctgctgccacgggcagcgacggccgaagggacggcagcgctggcttcggcggcgggagaacgggaggtttcggcgtcgacatggagctgttgtcctggaaagttgtaagacggcctgccttgctggtcgcagtcgagcgtcagagttgaggacgaatgtcgagcttgagccggtcgccggacagaggagagagctcgagtcccggccagccagagagaggggctgacgcccggctcctgctgatgagaccggacggtctgcagctctccgccgctcgatcaaagcatcactacagcgctgcgactggtcatctaccaagacagcagcctcccttagtgacgggtggaagaggggcagtctgggaaggtcggcgagtcgacgtcggctgggctgctgcgcggcgacaagcctactcaggagctcgcccctagcgaacagctgctctctttctccccgaccatcgccccttctcgcattcagctgtcgaggttgctcaatcagcgccggctgagtacgactgactagactgcggagtcaacacggccgcctccctaagcagaagtcagttctgcactcctccagcaggcagctggctctcgggtgagctcgaccttgagctgcttcgacctgcctgccatctgcgtccgacagggttgccgctccaccgaaggtcgctgtcgctcgcctacgctaagaccgagccggatgattgttctgcagcgctgtacacgcagcaggtccagtcctttgccagtcagcgccgtcgcagaatcgccgcatgtcgaatgcctagacgcccgcccagattgcatgcgtcttgccatcgcccgctgtttgtgggaagccaggacctgaaggaaatggttgaaaatgatcgacgactcatacgcacgccagtcgtgcttctcctccgaggggcgagcaagcgatgattctggcaggttgaacatagatcaacctgttgcggcggtaggatgcatttgtgagagatggcccaaaccccgcaagctcgacacgcgctgaggttggcgaggcgggcttatcggacgacgctcgccagactcgctggatgttgcagggcgtgaccgttgcgtcctcggcctgttttgcggccgaggtgccgtcgtcgtgacgcatctcgcctcagccgaagcgctgtcaacgagcttgcgatgcgtgatccgtgttcaatcttttgttagtcgatagtgcatgtcgcgccgggccggagacgcgaggagacgaaatgagcggcggtcacaggccttcgagctcacgaaggagcttctcgagctcgtcctcgccggcatcctcgatcagctgatcgacctcggcgtcgtcgtctgcggccgacggacgagccttgggtgccgtcattgtcgttgccgttgagagggtgtcggctcccgactgcgctgggggctcggtcaatgcagactgatccgccgaggacgaaggagcggttaccgaggacgccaaggatccttgagtggccttcggcgggatgccgatgtacgtccttggtgcgactagcggagcggggccaggcgggtcgatgccgagaaactctggcacgcggccgtcctcgacggcgtactcgtactcctcgagcgactgccaagacagcgaacgatacgcgtcagctcaattgcgaagctaagcgagtcgaacgagcagtcatctctcgcctggcgaaggtcaagtagggaggaaaggtgaggagacgtacgccaacatactggcgaggagaggacggcgagatcgcgcagcggacgagccaacgggcagcagacgcgtccgacaagagagaagagcgcagatgtcaggcaccctcctggccagagctcggggcgggtgctgccgagccaaatgacaggacgcacctcctcgtcgacgagaatgccaggcagccggccatctgtccggccccgtcggcgccaaagtcgcttgccggcctcgtccatgctcacgtcgcagatgctgaacgggatgcgaagcgtcgacagcgtccgaatcaggtgctcctggaaaagagcacgagggcaaagcgctgtcagcctccttgctgctacttcaaagcccctgccgaggtagtgcaggcaaagccagtcgcgaaggagggacgcgcctgtaggccgcgctgccgaggcggctgggtgatggaggtcgtctgaagagagcggcgagcggcagacatcagcaggcgcccggcggtcagactgcagattagaagcgactgacgtagatgacgaccgacatggcaagctgctagaaagaggcagagaaagggaatggccgtcgggagggctgaaagggatggctgctgctgcggccaacctcgtcgtccgcgcaggcggtcgtccttgccttcgaacgtcgacattcttcaagcccatctccagcctcatggcgctccctccgcttccacgctcggcgctggcgccgctcgtgctcttgactgtcctcctagtcgtcctctcgtacactggcaggtcggctcctgctccggcacccaagctcccatcgggacacaccggcgacgaccggagctcaccggcatacacgaagcaggtcgtcgcgctcggcgacctgcacggctcgctcgcgacggcaaagcgcgtgcttcggatggccggcgtcattggtctcgccgacgagtggacgctcgggacgggcacgctcgtccagtcgggcgacattgtcgaccgcgggaccgacacgttcgcgctctatcgctttttcgaggagctccgggtcgacgccgaggcccagggcggcgccttcacgagccttctcggcaaccacgaaacgatgaacgcgctcggagattggcgctatgtcaccaaggacgatattgcgacgtttggcggctcagccgctcgccgcgctgagatgtctcccgacgggtcgatcggccgggcttggctcgccaattactctctgacggcacggatcccgcttcattcgctcgagtcaagcacgctcgagaccaacacggccgccctctcggtcatccacgccggcctgccgctgacgacgccgctctcgacgttattgccctacccggaccgcctgaacaagctcgccaagtcgttcctctacaaggcgttgctcgaagaagctccaccctgccctcctggtccctggccaggaatcccgtcgtctatgacggccgaagaggccgccctctgggacggccagggtgtctggtggtggcggggcaacgcccttgatgacgagcgcaaggcctgcgacgaggcccggcggatggccgagctcattggcgtccgacggctcatctcgggtcacacgcccaactttgagggcatggtctcgcgctgtaacggcacgatccttctcatcgacacgggcatctcgccggcgtacggtgcgtccagtcctcgtcgtaaacgcggcagattattgagagctgactcgtccctctactcgctcgtcaggtggcgagttgacagctctgtcgatcaaaacgacactctaccctcatcgcccggatggcaagcacaagggcgacctccgcaagcgccggtcgtacccgcccgaggccggagcgcagcaggctgcgttcgatgcgccggcaggcgattcctctgcagagggcagcgccgacgacgtgccagtcgaggccgagtctgagaaggacgagccgtactggctcgaggtcgaggaggttgaggagctgcgactccctcgtcgaggggagggtatccctgacggcggggaatgcaaggcgcgtgagacccgttggcttgccggaggggagcgcattgtccggggctggctgaggtgacggaatgcgcatgctcgcttgtattttggccgtttttcccgtcagctccgccgctcgagtgtgtcagtgtgctcaatgcatgacgctggccgtacgcaagggacctccgcgcgcccagcagaccctactctgtctctcgctctgaccaccactatcgcacctcgcttcaccccttgaccccactcttctccctctcttagctgctccttcaggatcttccacagcgtccatatcgcacgcatgagctcgcccctcccaccgcctccaaggccaggccaggcccagtcgcccaaggtcgtcggccggctgcccttcatccgccggcacccgttcctcgcgttcggcgggccctttctcgcgcttatcgtcggcagcagcttcttgctgcagaacgttacaaggacgaggtgcgtcttgtcaggctgctcagttaattgcgtcgtcacgaagctggccgcgcttgaaccgagctgacggctggcctgctctctctcgacgttcatgactccctgccggctcccgacgacgcagatacgacatccagaagcagaagcagggctacgtccgtcgccccttcatctttgcttgtcggactgcttgcacctcgcgctgaccctctcgcgaccgccttggtgttggtcacgccagatgtcggctgaggagctgcgcaacatcgaggacaagccgttcgacattcgcgagttctactacgtgcgtcccgctcgcatggccgacctcgctctccagctggtggggcagaaggactccctgcgctcgcaaacggcctccaacatgcacgacatgaagctgactagcgacgtaccgccttccgcgcctccgcgcagcgcctgtccgagacggccctggccgaccccgaccgggtagtcccgcccatcgcgcctgcccgtcggcgcaagattcccaagggctccgatctgtttacggccgaggctcgcgcggccgacgactgggagatcaagcgcgtcgagcggccggaaggcgttgcggagtggggacaggcaccgctgagtgccgaggagcggatgcacgagcgagagcggaagctcgtctgaaagctagacggtggccgttgaagacggcagctcggtgggaaggactacgacgtatcatgacgacttgcaacgactgggcaaggaccagggtgggtggcggcgcgcaagcacctgcgtgcagcctctcaaccacacccgtggtcgcccagtccaggagcccgaacgtcgtgccgtccttcagctgacgagatgcagagccaagtgtttcggaaagcaggccagtccatcgatccaagcaggtcgcagagggaggtaggttccttggcgcaccctccatgtcgatcgtcctttttcgcccgcctcatcaacgtccagcagctcgattgcgaacagtcgagccccgtcttcgtccctttccgccagtccaccaagaaacgatacccttcccccctcgtcagcttcccgcaccgggaccaatcaaggacccagctgggtgtcgcgtgcgaggcggtgggtgatgtagagagggagagggatgtgtttcttgaggatggcgagcaggacgcgggagggcgctcagcggcgaagagccgagagcgagcggaaagtgttgacgagggcgagcgagtaggtcggaacgaccgagagaggagagacgcgaaggggacctaagtcctcaaacgacagcaggagaggtgtgtggcggtaggttggagtgtaggctctttagaagatgcggaggggcttgcccatcgacgacttgatgtggagcgacttgacgttctgccagttcttcttgaggagcgagacgaggaagttgaccgacagcatgacgttggcgaggacctggtcctcggtcatgttgcagtggccgacggcgacacccatgcagagaaccttcttgagctggaacttgatggtcgagcggacgtcgtcgaccttcttctggaggtcctcggcgtgcgagactggggtcgggaacttgccggccttagagagaccggggcccagaagacgggggatctgcttgatgagagcctccgaggcaaggaaagagtcgtacttcttcgcgagcttcttgacgagcttcttgttcttgttgagcttcttgaggtcgtcaaccgacatgtctgtgggagggcaaggcagggggcatcagcgacgagcgcgcgcagcaccggatctcgcggccaatgcaagacgcacactcgagctcgatctgcttggcgcggtcgatgtcggcggcgtcggcaagaatgcagatggtcatccgcgggcgagggatgttggggagcttgacggttcccgagaaactgagcagggcgggcgagcgagaggtcagctcgcgtgatccagcctcaagacgacaccacgtgccgggcgcctctgacgtcgctaaaccagctgagggacatctccggccggcgaacgagcgcagaagcctcggcacccgcatccggatgcgcaggaagggacgcaccgcttgtcgcgctgggggtcgtagttcttgaggccgatctggagctcgatcgtctcgacgaagttgcgcttcttgccgtcctcgagggacgaggccgaaagaagcgtgttgatgaatcctcgcacgctagaagctgacagcttagacatcttgatgggacctggcgggagggtatggggtgcggcggacaaagcacgagcacgagcgcgagcacaaaggagggcgacgaggagcggcagcagaagtaggccagacgagacgagacgagtgcgaacgaagagtagggagcgagcgcaagacggtcagcaacagtatacgagcaggataagatcgagcaggcagcaagacgaacctgtaagggagggtacggtgagtcggggctgaggagcaggcgagccgggccaaggcgaatcgctccgctcaggccgcacgaagggtaaaagtccaacttgggtgacgtgggcgggtgtcatccaagctcaccaaattgtggaacccgcaacagtgtccgaaccgagcctgatgagcgcctcatcgaagtcgggggttacgcccaaagctgatttcagccacggggaaagtgcccctaaaccctgcctgcgcgggccactcgctctcagccgacctcgcccggctcgcctgctcgccttcttcacctgccagtcttcaagtcaagctctcaaagtgcgtgaatgctaccgcgctgggcagtagcaaacggagaggccggaatgctgatcgtgctccccgtcttcttgatcctaccctctctgtgctgctcctgctcgtctcacgtcctgccggccgacctccgcccgtctctcgctcgccgacctcgcgctgctccgtgacgcaccgaacccctgcggctcgaacccgacctcgcgcttcccttgcgaccgacctccctcggaaccttgatcaccaccctcgcctaccctacctccgccctctcttcgcgcgctcgcaaagatggtgtgtcctcgcctcatcctctacaacggcagctcggcggcagcttgcttgcactcgctcggagcaggcggtatgccgcagcggtctgggcgcctcccaaggctgcttggccgccgccttcatcaccgcctgctagggcaccctccgggcagaagtgtttggggacgggcgggacggcacgagcggtctcggctgggatgctgtcgggcgggcaggctgccgtcgtgcggttatggcttcgcgctcggctcgaggtgcacgtgccgccttcgggccgcatcatgcttgttggccgggtgcaaggctcggctgcatgccagctgcaggtgccgctcgactgctagacggcagctggtctgctgtgaggcgacgcgcgtgctgttctcgtgcgtgccggcgccgcggcggtccagctcgaatgcaggctctgcacgccacacgtcgcccgggctccctccgtcaacccttctgtcgacgtcccacgagcgagctgccactccgaccgaccctgatcgtctgacgagagcagccgtgctgacgaggtctgtccccgctcgcccgctcccaggtcaacgttcctaagactcgccggacttactgcaagggcaaggagtgccgcaagcacaccccgcacaaggtcacgcagtacaagaagggcaaggactcgatcttcgcccagggtaagcggcgttacgaccggaagcagtccggttacggaggtcagaccaagcccgtcttccacaagaaggccaagacgaccaagaaggtcgtcctgcggctcggtgcgtgcttcttccgtctgaccgccggctttgtgtcaggaacgacgaggctaaccagtcgtctcgcccgcagagtgctcggtctgcaaggtcaagcaccagatggtcctcaagcgctgcaagcacttcgagcttggcggtgacaaggttcatcccgctccgcccatgccatatcgaagcgcagagctgacgaacccttgcgcgcatctcacagaaaacgaagggcgctgccatccagttctaaggatcggacccccttactgtggtcgccttgctggatcgatgatgactggactcagacagacgtcggcacgacaatgggacgaggagggcgagcgggaggagcatcggatgttgggaggcggccgtgtcggcaggtagggcacaagctttgcgcccgacgagggaaatcgccgaactcgtcgcgccatcttcttcccctgtcctcctgtcctccttcagatcaaggtcagacaggaagaatgctgtgccaacttgcgcggtcgtcaggcaggtcgacgcgatggactcggtcgcgtcgcgttcgagagacgactgcgcatgcgcccgccgcctcaactcgacgtcggctgcctcgtgcttgccagcgaccgtctaccgcccaccaccctcatctcgtccgcggcgacatagcttacgagcacaaatgagacctgagctttgtgcgtactgccagccagacctgctagaatgtcccgctggctgatacgctgctcgacctgcagccagacaggcgaacgccgcaaggacctcctttctccgcccaacgcacctgcctcgccaactcgcgtcgtcagaagagacctctgtacccggtcgcttcgtgctcataaccgccgtgagttgattgtcttccgctagcccacgcgacttccgctcgggcgtgatagttgctgatgttcactgcgtcctctcaggccggcctcgcctcgaccttgcgcacaggccagcccaaccttcactcgcccaacaccgcctcagcatcatgtgaggtgctccctgcctgtgagctggtcactggacggtggctgacagccagctctgcatcgccttccggtcggataggttgcgtggcagcaagcgcggcatcgctcagcatcagccgcagcgacgaccattcggccaggagctgaaggtccagcgcacgactcttttcaagttcttccgcaactaaagttcttgacgctctgcgacgaagactttgcgcgcatcctgctctctccgcattcggcgatcgagacccttttcgtcggccaccttttctcgcaacggtacggccgagacggagaagaccttgagccgaccttccttgccgacccgacggacgcctaccgcctcttcatcgacgaggtctgccgggccgttctcgtcgacgccgagccgcttcccatcgctgcgctccgtcggccttagtacgtcctcggcctacaaggacgtctcgttcgcctcgtacgagtcgcgccggacgccggggctcgtcgagatcgccaagctcaaggcggccaaccggaccttaatcgacgagtatgacgacgagtggcgggacgagtggtttgctgatttcgtctgaccgggagggtcgtggggggcgggcgcagcgctcggaggcacgtacctcgctgcgttgcgccgagagaagcggtagtctgcagttcggagcgagtgcagctgcttagtagaaggaacccatccgcagcttgcaagaggcaattccaacatgcgccttccgacgcagggttggctgccctttcgcgctgttgttcgcgaggccgggcgccgccccattctccgctcctgagacgtcgccacgtcgctccttgggccgagagccatgtaaatctcggtttggcgcacacagaaagacgtctagaggagaaggagtaggaggggaagggggccgtcgttgcagttacatgaagtcgtcgtctccgctgcgattgcgagatgggtcaaaaaagtcgtcagcattgcacacagccgaaagggctgcggaggagcgcaaggggacgcactcgtcgagggcatcctcgtaggcgttcgtatcggtcctgcgagaggtgcgtgagcgcgaggtcagcgataagatgcagaaggcgcagctccgcgcgagccaccaaaaaagaaggaaggaaggaaggaggccgcactgaacggtcgacttgccgccgccaaggatcggcttggccttggtgaccttcttctttccgctctttgcgtcgcgctgctcctgctgcttcgtgttggcgaggattgacaggcccgaggccgccttgcggacctccgagtccttgagcgtctcgcagacctccttgacgtggtgctcgacaaaggacgagaagagcgggttagccgcgtgccgctcgatcaggagcgtgtagagctgcgacgagaaggcggcaaagtcctccttggtcttgcacttgatctcgagcagcgagctgattgacttgtctgcgggccgagagataggtgatgcggaagccgagagcgggtcagcgtgcgcacccgaagcgaggccatcgctggcaggccctaggactcaggcagatggtgaagacgcaccctcgaccgatgcggagccgagcaggtcggccgcgttggcaatgtcggcctcgatctcctgctgcttctcaagccgccggcgctcctggggcgtaagctcgagtccgacgtcctcaatcttgccagcgaggatctaagcgaagacaacggcgaggaggggcgcgcagcgaggtcagtaagattgccctctagccatcgggccgactcgagcgctcgccgtaacccgcgcgcgacaggtggcagaggaccgctatcgcgagcagcagactgcggcagctttgttcgaccaagagagagagacaaaggtcacgcacggccttcttgcgctcctcctcctgagcagccttctcggccagcttggccttcaggttgcccttcttgcgcggggcagcggcggggacggccgaggccgaggcggccttcttggtcgcctcgtcggcggaggaggcgtcccagtcgtcctaaaggcgggcgggcgagaggtcgaggacagcttggaggtcagcttcaggagggcaggagagctcgagcacacgacctcgagcgagcgtttggccgagcgcgagcagctcgcctggcgccggacctgccacgacgaggctcgcacgccagcaggacgtacatccgagtcggccttctgctcgacgtcctcgtcggcgaagcggctcttgcgagggaggacaaccggcgccggcgtggcggcgaccttggtcggctcgtcgtcgctttgttctaggtcgcgcgcgcgcggacgagggagtgaggaggggaggaggcgtcagactttcgggccgtcggcatgtgtccgcagcgttcagtcgagcgaagactaaccccagtcagacatgatgaaggagagcgagagagagagaaggtgagagggcgagtgacggtatgggttgacgaggttgaggcgacgacgacgacgagacgctcgcccacgcggcgagaaacggccgaccccctgaagtcgggcgcagttgggctcaggttgggaaacgacgtacctggccaagcatcccctcagatctgtccgacgctcgccacctcggccggatcgtgtgtgcagaagcgatcaagtagagatgagagaagcagcttccatccgataccacgtttgccggtcgagagccgagatgaggcgcttacagtcgctgcagcgtcagacggcccagccgcctcaggtcacttagacgagctcaggccgagccgtcagcatacggccagggtcgcccatcgacgagcagcaggaccagcatgcaagcgagcgaccgaggcccacgggtgacgaggtttcaggtgccggggtgcgggcttgtctcgcgagcccctttccgccgcctcttttttgcggccgagggcgctgtttgcttggcctggccgcgcagtctgttcgctccggtcgacgaccttgttcggcccagcctgccctttgatccgacctggccagagcttcccgtcaaaggccctcgctcggctggctgctaacagccaccttctctcacgtaccgcttcctgtcgctcgactcattcaactcgagctatcccttcactcgctcgctcgctcgcttgccccgaagcggccgcctgcctcagccacccccgcagcccacctgccagctctcctgtccctcgcccactccggccgacctcctctcttctaccagctcacgagacgccggccccatccccttcatcggcgcccgacctcacctcgcctcccacgagcagcagcagctcgagccgccccacgaccgccatctcgcccaggtcttctcacctggtcgctcctcctctcgccttccctcctgattgcctttccggaggacccacgacctgccaggggctcgcccacgtctcgccgcttcccttcgcccacataaaggccgacggcttccttgcccttcccttcttctttccctccaccaccaccattgcctctccatctcctctccgtcgtatcccctcgcatcccaaaccccttatactccatcctccaagatggccaccgcctcgttcgaccccgactcgaccggcgccgcctcgagtccgactgcctccgagtcgtccttgacgctcgcaaagacgccccagacgttcatcgacctgctgacggtcctcggccaggcgagccaggccgtccaggctggggccgacaagcgccagacgacggccctccttcagcgggcgatggcgctggtcggatcgctcagcgtcgccatcctcgtccctgacgggccaggtcggtccttccttccttccttccttccttgagcggccggagcttctccttctgccgcacatcgactgacgggagaccttccctttcatcccttccccatcagccggcacgtacgacgagacgaccctccgcggccttgacaagcttagcctccgcgagcaggaggacggcgacgtctgcccgtacgacggctcgaatgccttcctcgccatgcagcggagctcgtctgacggtgcgtcttttctcttttccttgtcacccctctccctccgacctccttcacacccagagtcttccttcacacgtcacagaccgctgatcccctttgtcatcgcctcctttcaccgtcctttgccaatcttttagacggctcgtccttctcgacgaccccctcctcgcctccgccgccatcgccgaccctctctggcacctcgggccctaagcagcagcagcagcccctgtcttcgtccaagctggcaatccagcgcgccgcgcccggcacgcccaagcacggcctcctcccgccgggctttgcctcggccctcctaacgccgccgtccgagaccaagctcgcggccatccatgccgcaaaacagcagcagcagcagctcaacatccacgccaagccggtcgtcttccggcccgacagcaacggcggcgagctcgtcatcccgagccagcagctggtcgaggcgcctcccggcttccgtgcgtcgctctgtctccttcctccttagtgtgactccacctgacgacttttaccttaccggacgccttccctccctccttccagagtcctcgctcgtcccctcggtctctgacgccgacttccgcgcccgtgcgacgttccaccgaacccgcggccacggcatccaggaggcctacgacatgacgctcggcctcctcggcgcgacgacgatcgacggcgtgaccatcaacttcaaggtcggtcgtccctgctcgaccttcgcgccagttaatggaacactgacgctctttgaactccaggtcagcgacgcctacctcaacgaagagtcgctcaactacagcgagagccttctcacgccgagcggcgtgaccggctaccggtacgacaaccggtgcgtctcccagtcttccgctcctcaacgttctctcgcaccttatctgaccctcccctctcctttcgcaacagcaacggctcgacctatgtccgctttgacgagccgaccggcccgcgcacgctctttgtccggcacgcccacccgccctttgtcgtcaacggccccggcgctcaccgctcgccggccatgctcggctcaccctttacgggcgcttctcaccagcaccaccactaccagcatcaccctcagccgcaccacgccggcggcggtggcggcttcctgacttcggccgcgcaccactcggccctgctcgcctcgccgacgcccaacaagggcctcggcttcggcaacctcctgccgacgcccgaatcgtccttcgtcggccaccagggctcgcccctccgcaacagcgccagccagttctcggttcacgacctctgggcctaaaacgtcttgctctgccggccctcgtgccacccagatccctcatgactctcatctcgctcttctctcctcgtgcttcatctctctgcctgcttacagacctcgttcccgtcgccatctcctccttccgtagcttagcaaccacccttccattacgtacctcatcgctctcatcgaagagctgcctcgacactcctctgtcctaccgactttctcctcccgcaacgtctcctcgccctctttcggacttgtacaagcgcaacctccctccctcacgaaaatccgattcacacacgcatcgccctccttagtcagctctctttcccttcctgcaagaatcccctcaaccgcgcgatgcatgatcaccctctctcaaacttgttacaatccgcttgaaagggcacgtcactgccggcgagcttgtcggctcaatgaagttagggaggtcggtccagcctctggtcagactcgcacggcaagtcgtccaatcgcggacgacggcagatctgacgctcaccaggcgagttgctctctttcttctcggacagcggagcgatctcaggacagaggagtgaattgcatcgacagcctcggtggacgcgcctctcgcgcacgcgcccttcttttgctcctcgctggggcgcctcgttgagccaagcgccgggggctcagttgtagatctgcgggcagtcaaaaaaggggatcaaagtcagcggacgacattgcgaaggagacggtgagcgggtcgacgtacattccagctgcgacgccagcgcaggccgcggtgctgctcgataaagccgctgatgccgaacgagacgcccttgaaccaccagaagacgccgatgacggcgagggcgtagccgccaaagacgagccgcttggtgcgtgtcgtcagccggccgttggcaaaaataaagtggtcgaggaggtgtccgagcatgaggacggcgaaccagagcggcggcatgtagtggtggaggtaggtgacgcggcccatgatgaggaaggggatatagtggagcgcccagccgccaaacgcgagcttgaagccaaagatgaacttctcccactcgccggggccaaaatcgacgtacttgcgctggccgcgcatcaggtagccgatcaagacgccaacgccgacaaacaggctgatgcttgacgagtacctgccggggcgcaggagggcaacggtggttagcgacaggtggcgccgagcagtggacagacggagggagagcgcaccagatgacggggttgccgatcaggtagtacttgatcgtctcggccgcccagccgcacatgcggaggccgaggtagaggaatggccaggcgaacggcggcgaggccaggacgtcctccttgtccgggtcgggcacgagcgcattgttggacgtcatcatggcaatgttaaggtgccagaagtcgctgaagaagggcgacttgtagagcttggcgtcgcccttggggactggtggcagaagggagggcgctggctgtcagttgacctgctcggatcgcaaacgagggctcgacctgcacgcacgcttctcgttccagtggctctcgatgttccagtacgtgtgggcgtcggacgggttgttctccttgtcgcacgagacctcgacctgcttgaagccccactgagggaggataacgttggccgccttgaggtagcagttgaggttaatgtggcggaacctcagccggctcgttaggctgtggatccgctggccgggctgcttgcgcccgcgaacggcgtcatcgacaacctcgacctgccagtagtcgttcgcatcgccgaccgtcaggttgccgtagccagcgacctcgtagtcctgcttgctgacgggtgcgatgatcgcgtgcgagtgcaggttgcgctgggtcgacgtgtgcaggagccggatgatgtcgccgtcttggatgaaacggggttcgtcgtccgggtcgatcggatcggcctcccacgttgggagaatcgtccagtggttgttgtcgtccttgtagtggtagcacgtcacctgctgctggaacgagccgaccggcatcgtctggacgtgcgagtggagcaggccgccgccgtagcccatattcttgagcgtcactttcgagtggaaggcggcctctgcgacgggccggaggcaaagaaggacggttatcagcgcaaccacgagcgacctctagcggtggtcacaacgacgcaccgagcgggttctgcgcaaagtcgttgccgttgaggttggcctggaagagcgagctcatctgcgagtcgcccgtgcccgagttgcggaggatgagaaagtggagcttgaagctgagcaggtaaaccgagagcgggaggacgatgaagccgaggatgcgcgcggcccagtgcttgacgtacgtccgctgccgatgagagggaaggtcagcaaggcgcggcctgctatacgcgtcctcatcggtcggactcacgaagggcatcgacaggtcgccaaacttgtgccagaggtcctcgatcgtgtagaggccgacgagcgccgtcgcaaaaaagccgacccacttgacgctaatgacgcagccgattgagaggccggtgaagacgagccagagccaccagtcgtccgagaacgggctgtaagcgttgaaggcacaggtcgtcagatgaagtgtgcgcgccaagggcctagtgcgagcgccgaggagactgactcgtcctgcatgttgtgaaagttgacgaggccgagcgcggtcgtgaaggtgaagagcagcagcatcgagtcgagcaggatgaagcgcgagatcgttaaccatccgacgtctagatgggcaagcgaggagggacgagggtcagcttgaggacgctcggctgctggcacgtgcgcgagctgcggcgcgcaccgaagaggaccatcagcgtgacgaggtggcacgagaggtggttccacttgaggcccttgcacgtgtaccaggcaacagggaccatcaggacgccgtaggtcgccatgtagagccgccagaggccgtagcgcatctcgggcgggtaagtcgtcccggacttgaactcaaagttgccgtcgtagccggcgaggaggccggcgaggccgacgagcatcttgccgagcggcggatggacgtcaaagtagaactcgcccttgatatagtgcgagccaaacttgccaaagtgggcctggccaggagggagtggggggtcagcgggtgaacggtgctgcggagccctgagaaggcaggccgcacctcgtcccagacgaccgagttgctccagccaatcttgtagtagcgcgtcatcatcgaaacgaccgtgtaggcgaccggaatcaggtggtcggcgttgttaacggcccactcgcgctggtcagagttcagagggttgtcagtcagagcctgtttcagcgctctgctttagaggcacggcggtcgtcgacctcgaagagatcccgccggacgccaggtcactcacccaggtctttgccggcggcttgtaggctggtttctcacgccgagcaggtgccctgccgttgccggttagcccgcgcttctcgtcgccatcgaggtcgccgtccaggtcgagcccagcctggtcaaagccgccgccgccatccctggccgccggcaggccaccagcgacaccacgccgccggggcgcggctccatctagcccgccaccaccaccgagctgggagctactgctgctgtcggcaactgccgccgcttgggctgcggccgagttcatcgcgcgcgtgttgaagagggggagcgagtcgagccggtcgacgtggttcgggtgcggggtgtcgtcttcgtcttcggcggcgtgctcgtcgtgcgagaaggcaagcgctgagctcggacgtgcagatggcgagggactcgtcgtcgggaggaaggcgctggcaaagtgggtcggtgtctggctcgaggcgccggcgcgtttcatccgcgatgccgaagcttctagggccggaaaggcggcttggtaggccttgtaaaaggggagcgaggtcggaccggccgtgaaaagtgctcaggcgagctggtacgttctcttgacgagaaaggaaaatggtcggggaagtaggtgacagctcggaggaagggagcggacgagatggcgctgcaggggccgagacggcccagcctggcgcgcgactttcctctgagcgccgcgcaacgtttcgcccagaaagtccagaccgtcctaccctatcccatgccgctgcacgtccttattctctctcgcaaacggccacgatggaaggggggcatgaaggtgggtttcatcgcagtcgtaaagagtggtcgtgtacaacgtgtaaaggaggggcaggggcatggagggcgcgaacgtaaggggatacttgcacaagaagcgcaacataagagaaggcggcagggcctcatgcaaagttcggcgtttgctgcgacggtaggtcgttgacgaggccgagatagtcgtccttgatgctgccgatcgcaaagatctcggtcgcgtcgacccgggtgccgatcagcttgacgcggagcttgacgcccttgcgaatgctgtccttggcgccgccgttgtccgaaaccttggtgtaagccgggtcagagtccttggggtcaaagacgaactcggccgagacatgctagggaggcagggcgagaagggaagaagaacaaggtcagcgatgggtctcgagcaggaaggggcgaggactcgagaagggaggatgaggtgatcagcctagggtcagatgtctccatctgccctttcctgtacataaatcaacatggccctccgaggagggtatttagttgtccctatgctaaaaatgacatcatgtcgtctccccttcgtgcgtcgagagcggctcagtcggccgaggatgccctcggcctgcggagccgactcgcgctgccatccttcctcagagtcgggccagagggagcagagggaacgaggactcacgtgactcgagacaaagaccgacagcgggccgacgtcgaggaagatgcccatctttgagacattgttgacgacaccgtcgacgacctcgttcttgaacggcttgaagacgatcgcgttgtactcgaccttgaactgtgcctggcccgtgccggggacgatcaggccggctccgatgtcaaggatggtgaggacagagatgatgtagctaaagagcagcagacgaggggaaggggagaggtgagtacgaggcgcaaagggagagggtgcggcgtcgaggagagatggcgagtgggtaggggatcagaagagaagtttgttctcatttcatttagggcgttactccttgatacgaagagctgagtttattggttcgtgcagagcacttgttcatcacgaagagaaggaggggtgatgggcgaggaggaggcacgcgaagcagaggaagaggactgaccccatgcgacctgagcaagtgccctcaacgtcctggtggagcttcgtcttaaggtactcgatcatcgacggcccaaaataggacggatgaaggaggatcgtctccgtgagtcttttctgtaaggcggaggagggtcagggtcagcgatcgccgtcgacggaggcagggaagggccagagacgcacgatgaaaaacatggctgcggtgagcctcaaggaggacgcctgagcgctctgcggaccagcgcgcgagaccccgtcgtgggcaaacggaagaggaagggagagagagtcggagggaggtcgtggttggaggctggtcggcgaggcgaagggtcgtcgcgagcctgtcttttccagccgccgactgttcaaactccgctcggcggcgaggcacgcgcctggcggcgtctccaagggccggtcacacgccgttgctagaggagtggcgagggctgatcgccttgtcgtcgctccgacttcgtcctgtctaccatcacgcaccggcgccgacgactcccgcggcaagcagagaggtggagtcttccctgtcctttctcattgagaaccttgctgacgctcaaagactgcttagacgtgtgcccgacccgccgccacctcaaacagctcgcactgcgcccggaccctccctgctcggctcaacctcagcgcctgctcgactcgcatcccgacctcctacgtgagcgttaaagatgtccgaggagcttcctagcgtcctcattcttgggtgcgttgcctctgccgactcgatgaccaaggtcagtgctgatctcgctctcgacgctggccttccctcccccctttgatcgctgcagcggcatcacgagctttgcctgcgacctcactgccctcctgctctcttcaccaccgaagatctcggtgcgtcttattttccctcgcttttggctcagcatgcggctctcgcgacgctgaccagccatctcgtctggccggcctgcgactcgtgcgtccgacgcgcagcacctccgcatcgtcgacaaggtctcggtcagcccagcgacgacctacatccctccggccttcttaaaggcgctcgaggagcacaagggtcgagtcgagtaccgccaggccaacttgacgatcgcgagcgtcgtcgcggcaagctttgagccgccagagggcaagccggcattttcgatcgtttacgatctcacgggcgagaaggcattcgacaaggcccctatcgtccgtttgccctgaaattctcctgccttccgatggcttacggctgaccagtctagtctcgtgtctgctcgacagatccacatgacgtcgacgctcgccgtcgcgatcctcgttggcgccgaggctgagcggcgccacgtccggtcgtttgtccgcgtctgctacccgtggtacgagatgaagggctcggagaagggtggctacaaggagaacgtcaagctcttaccggatggggaccgtggcaaggtgagtcgtgcgctgtcgaggaatggcgtcgtggggctcacacctctttccctttgcctccagtggacgcacgaggccctgcgcgcattggccgcctttccaaagtaagcaggccggaagaaccctccctgactcgtcctgcagctgaaggtgtcacgggctgcccttgtcagactcaacctcgtcctgctgcgcatcggggctgagtacgggccaaactgtctgacgggcgtcgtcacgccacgcatcgtctgcggcgagatctaccggtatctcaaggaggacatgaagctgctctgggttcgtcgcttggtttagtcaagacaatccactctcgtagctgacttgctcgcctcgtctgacttcacagtcagccgacctcaagatccacacgatccacgtcgacgacgtctgcgcggcctgcgtgctcggcgccgactggatcggccggaccggccgcgaatcggcgacacgcgagcacggtatcgagctcgcgttcagcggcgtcgacaaagagagcctcgctgacctccccggggcctgcacgccaaaggcgagcccaagggcgccgctgttcaacattgtcgatgacgacgggacaacgcaggataagattgcctcggccgtctcgaggttttttggcatcaagcacgattattatggcgcggtgacggcgctgtttgccaagttgtcgatgaagagcacgagcttcgaggacatggtcgatgacgccaacgaggtgcgtcgatcccgactctcagccaaagaaattgacgctgactcctcccgcgaccggccctgaccagatgcatgtcgatgcctgggctgagatggcggccaaaaacttgccgccaatcgagaactcgccgctgacgccctaccttgatgcccatgagttccagaaggtgacccccttttgcgcaacttaaagcccatccctttcactttcgactgaccacctgcctctcgcccatcatcagcttgccatcaacctcgacggttcgctcgcgcgcaaggtcctcggcttctggccggcacacaagggcatcacccaggacgaggtcggcgccatcgtccgtggcttccgtgcgtgtcgacccggcttggctttgacccgcgcgtcgcgtgctgaccctttaccccccctccgccctcgtctatcagaagaccaaggtctctggccgagaatcgcttagccctttcgttcaccgtggcatctccacgcagcacgggagctcaccctgctcgctcgaccaccttgatcttcgacggcgccctccaccgcccgaatgcggcccgggccggcccgacctttccccggccgacgccctgccagcccgccctgcgtccagcttgctcccttcatacaccacatcagagcgctgcctcctttcaccctagacttgcttgctatacctctgcctcatgcagactaagctcagacgtgagagctttctgggcgggccggccggcttgcagactgcgcgagaagtggaggaggaaacaagcatcggcttcgcgcgacgagctgcgtggtcatccgaaaacggcccctctccccctgcctccgaccagcgacctgcctgcctatccccttagacgtctcttgaaggccaccccaggctctagcattcccgatggaggctctctcgcagccggtcgacctgctgtcggctcagacgttctttgccctcgcccatcccgccgcgctcaacgctacagcctcgtcgtcgtcgttcgccgcttctgccgtctcagccctcgcggccgatcgaccgccggcgccgccgtccttcttcgtcggcctctgccggcatcctgccggctgggggccctacgctaccggcaacgactttactccctgtgccgagcaggccgtcctcgtcaccgtcgagatcgccttcctcatcctcaccctcgtctgggctgcgagccagtggcgccagcgggctgccagccgggccgcctttggcgagggtctggagggcaagaatccgctcgttctgcgcggcaagctggtgcgtcgtgtcctgctcgctggcctgcagctccttgcctcgtaccggagctgacccgtgctgcggttggcctcgttgcttcaggccttcttctcgctcgcttcggtcgccgcatttgcacaccttggcctcctacttcggacgggcgctatctcgctcgcccggccgtcgacgctctcgctcatggccttcctcctgccggtcgtcgcgctcgcctcggtcgcgctctcgcattacgtccacctgcacacgtgccggtcgtccgacctcgtcctcatcggctggtcagccctctcggtcctcgccatcccttacctccgtacgacgattcgcgaaggcgcgctcacgacgcccgccggcaacgccatctggtcgacgttcgcctcagccgtcatctttggcgccgtcgggctcgggatcgagctcctcggcccgcgctggacctggcggggcgagggcaagatcaagctcgaggacggcgcccggcctgagcggggcgggtccgacaacccgttcctgacggccaacttctttgagcggctcaccttctcgtggctaacgccactgatgaagctcggcagcaagcgctatatcgacgaggacgacgtcttctcacgtgcgtctctgctagtcgcccttcgagcttcgcttgatatcttgctgagtccttcccgccgcctgcagtcaacccgacggacgaggctgcccacctgcacgagcagctctcgaagcactacgccgagggctcgcgcaaggctcataccaaggacaagcagccgtcgctctttgtcgcgctcgcaaaggcctatggtggaccgtacgcgacggcgaccgtcctcaagctgtcaaacgacctgatcatgttcctccagccgcagctgctccgatccttcctccgatggatcgctagctacaagaccgacgatccccagccgccgatcaagggcttctgcatcgccgccctcatgttcatctgcgccgtcggccagacatcgctcctccaccagtacttcgacagggccttcaccaccggcatgcgagtcaagtccggaatagtcatgctcctctaccgcaaggcgctcgtcctatcgaacggcgagaaggccggccggacgacgggcgacatcgtcaatctccagagcgtcgacgcgatgcggatcgccgacctcatgcagtacggtcagatggtcctctcgggcccgttccaggtgagccgtgccgggctgagctccgacggtagtacaggactctgaccgatcgacgcgctttctcttgcagattatcctcgccttcgtcagcctctacgacttgctcggatggtcggctttctgcggtgtcgccgtcatgctcgtctcgctcccgctcaacgccgcgattgcccgctaccagaagcgactccaggtccggcagatggccatcaaggacaagcgcacgcggctcatgaacgagattctctcaaacatcaagtcgatcaagctctactcgtgggagcgcgcgttccgcgacaaggtgctcgacgtccgcaacaacgaggagctgccgatgatccggcgcattggcgtcgtcaatgtgcctcctcatacttctcccccgtttcttctcctcgcgactgacccctcaccttctgctcgatttcgcaggctatcagcggcttcttctgggcgagcacgcccttcatggtcgcctttgcgacctttgcagcctactcgctcacctcgcccgagccactcacgtccgaccgcatcttcacggccatctcgctcttttcgcttctgtcgttcccgctcgccgtcttctccaatatcatctcgtcgatcatcgagtcgctcgtctccgagaagcggctcgtcacgttccttgaggctggcgagctcgacccggacgcgcgtatcgtccttcccatcggtcccaacggcatcaagcagggcgaggagatgattaggctgtcacaggcgagcttctcgtggaacgccgaggctggcgcgcctgcgacgctcaaggacgtcaactttgtcgccaagagtggcgagctcgtcgccgtcctcggtcgggtcggtgatggcaaggtacgtccgcctttgctgctgatggcgcacgtacgccgtcaggcgctgacccgtttgccacccactctcccagacctcgcttctctctgcaatcctcggcgagatgacccggcggtcgggcagcgtcaccgtccgcggctcgattgcctacttttcgcagtcgtcctgggtcctgtctgcaacgatccgcgagaacattctcttcggtcactcgttcgaccccgtcttctacgagcgcgtcctcgaggcctgcgcccttggacccgacctcaagcagtttgcccaaggcgaccagaccgaggtcggcgagaagggcattggcctctcgggcggccagcgcgcacggctcgcgctcgcacgggcggtctatagccgcgccgacgtctacctgctcgacgacccgctctgcgctgtcgataaccgtgcgtcgagcgctcggtcggacaaccgcctgctccgtccagtgctgaccaactcttcgttctgccccgcgatcgacagacgtcgctgcccgtgagtgatccgcgtcaacccctctgccttcgaccaatgctgaaagctccttctcgcttgcttcctgcagaccttttcaagcacgtcatcggcccaaccggcttgctcaaggacaaggctcgcgttctctgcactaacagcgtcgccttcctcacttcgaccgaccggctcctgatgctccgcgcgggcgaaatcgcggagcaggcgacgtatgacgacgtcatggaggctaagaattcaccactgtacaagctgatcgccggtctcggcaagcagggcgcctcgggcgcgacgacgccgggccactcggatgacacggctgtcgacgacaaggaggtcgacctcgacgaggtcagcgaaaaggtcaacgcggcacgcgacatcatggctgcgtcctcgtcttacctgatgtatgtccggctcttcgattcactgcggaaagctgtcctctactgaccctcttcctgcactttggccaggtctcctgccgaaagcaagcggctcgcgattcgggcgatgaaggagtcgaccaagccaaaggagaagatggagcggggctcggtcaagggccacgtctacaagcagtacattgcggccgcctcgacgatcggcgttatcgccttcatcacgatgaacatggccgcccaggccttccagatcgtcggcaacctcgtcctccgctcctggggcgagaagaatcttgaggtcggcgcaaccggtgcgtctggcttgcctgcctcggctctcgcacaacctcaattgttgaccagctttctctgtttgcagccaacattggcctctacctcttcttctacggcatgtctggcctgctcgcctcggcgctcaacatggcctcgagcctgctcatctggacctactgtgccatccggtgcagccggcagctccacgaccactcgttctccggtgcgtcccgcctccgaagacgagtgctcgccttgggctgaccgtgctcctcgacctccagcgctcatgcggagcccgatgtctttctttgagacgacaccccagggccggattcttaaccttttctcgcgtgacatttacgtcatcgacgaggtcctcatccgcacctttacttcgttcttccggacgctcgcgagcgtcggcggtgtcatcttcatcgtcggcatgggcgcgccgtaagtctcgtccgctgctcaattcctctgcgacctcgcgctgatggcagtctccttcgacctctctagatttgtcctcgtcggcctcattccgacggccatcgtctaccgcaagatcatgctctactatctcgcgacttcgcgcgagctcaagcggctcgactcgaccagtcgggcacccatcttctcgtggtttggcgagagcttgaccggcctgagcacgatccgcgctttcggccagaccgagcgcttcagcgccaactctgagggtgcgcctcgttctcggcttggcagttctttctgaggctccggctgaccctagcctggcctcccttccagccttcctcgaccgcaacaatcagtgctacctgccttcggtctcggtcaaccgctggcttgccgtccggctcgagttcctcggctcgctcatcctgggcgcagctgcactcgtctccatcttcagcttgctctactcgggcgacatcgacgccggtctcgtcggcatcaccctcagctacgtcatcacgtgcgctcacgcccttgtcctgcgtcagaccagacagaagctgactctgattctaacttccgcccgctcagcgtcaccggctcgctcaactgggtcgtccgctctgcgtcggatgtcgagaccaacattgtctccgccgagcgtgtcatcggctacggtgcgcctgtggccggccagctgcattctcggttagacttgctgacatctctccccgtgcgctccaggtgagctaccctccgaggcggcggacgaggtgcctaagaatgagccgccagccgactggccccagcagggcgccgtccgcttcgacagctacgtcacccgctaccgggccgagctcccgccgtgcatcaagggcatcacgctcgacatccgaccgggcgagaagattggcgtctgtggccggtacgtcctccgaacgcgaccggaaccacatcgtgcacagactgacttcctcacttctcatggccttcacaggactggcgctggcaagtcctcgttgacgctcgccctgctcagggtgatcgaggcaagcgaaggctcaatcacgatcgacggcgtcgacatctcaaagattggcctgcacgaccttcgttcgcggatttcgatcatcccgcaggacccgcagctcttcgagggcaacctccggcagaacatcgaccctgtcggcgactacacggacgacgccatctgggaggcgctatcgcactcacatctccggccttacgctcaggcgaacggcggccttgacggcaaggtcgccgagggcggccagaacctgagctcggggcagcgacagctgctgtgctttgcccgggcgctcctgtgcgtcacccgcctccacttggcgacctgccgacctgcgcgctgacgccctccctttctcatctcgcaggcgcaagtcgaagattctgctgctcgacgaggccacctcggcggtcgacctcgagacggacgccgccgtccaggcgatcctccagggtcccgactttgcacagacgacgatgatcacggtcgctcacgtgcgtcgtccctgccgtctctatccttgctatgcgtcgctgatcacgctctagcctctcccttttgcaccgccagcgtctcgacaccatcattgcctcgacccgggtgctcgtcatggagcagggcgaggtggccgagtttgacacgcccgaggcgctgcttgctaacaagaactcggtcttctactcgctagcgagcgctgcaggcctcgtcaatgtcgagctctgagcgataccgcccgccctttataatcttgccggccctttctagatcgtaatgccctgttctcctgttgctgcctcgttgcggacgacctcttgacgagagcgagccgggcgaaagtggcgatgctttgacggacgacgacgaggtcgagcgactgccgacgccggcgaagaggcggccgccgcgtttcgccctgccgcctcctttcgcccgaccaacacggtcagcaacaggcttccaaggtggcgagcgttgacaccaaggcgcggcgcacctcgaactggccgtacgagccggcgatcgagatcgtcgtgttgttgcccatgacctgggcggcgaccatcgtcagggcctcgcactgggtcgggttgaccttgccgggcatgatggacgatccgggctcgttctcggggagcgagagctcgccgaggccgcagcgggggcccgaggcgaggtaccggatgtcgttcgcaatcttcatgaacgagacggcgatcgtgttgagcgcgcccgaggcctcgacgatggcgtcgtgggcggcgagggcctcaaactggagaaagatgaacgaaggggcagacgagcgtcagcgtgaagagagagggagggtggcgttgctgagggcggccgcaccttgttcggggccgtgtggaaggtgtagccggtgatagccgagatctcagcggcgactttgacgtcgaagcccttcttcgtgttgaggccctgagatggagagagacgtgggttgtcagcggctgcgtgccggtcggctcgaattgtcaggacgtacggtgccgacggcggtgccgccctgggcaaggagcgagagccgggggatgacgtcctcgacgcgcgagatggcgttggtgagctgctggacgtagcccgagaactcctggccgagcgtgagcggggtagcgtcctggagatgcgtgcggccaatcttaatgatgtgctcaaacttcgcgcgcttgacctccatcgcgtcgcgaagctcgtgcagggccgggaggagcgtcgcgttaagctcggtaacggcggcgacgtgcatggcggtcgggaagctggagagggagagtacaggccggtgagctaacgcgccatgcatgctgctcgttggggctcgagacgtacgtgtcgttcgacgactggctcatgttgcagtgatcgttggggtggacgggcttcttggagccgagctcgccgccgagcgtctcgatggccttgttggagatgacctggaaagcgcgaggaggcaagtcggggagccggggcagtcagcgatggacgcgcgccggaagagcctcagccggagccgaccgacctcgttgacgttcatgttagtctgcgtgcccgagccagtctggaaaacgacgagcgggaagtggtcgatgagtttgcccgagatgacctggcagcgagaagggtggtacgggcggtcagtcgagatgcccgtgttgtacccgagacgaggccgggtggcggcggctcacgtcgtcagcggcgatctgaatggcctccgagattttggggtccaggcctgcaagggaaaacgagcagcggtcagtgctgcaggcgcatcgtttgaccgagcttttgggagggccacgcaccgtagagcgtgttgacccgggcagcggccttcttgaggacgccgaacgccttgatcagcggcgggggcatgcgctcagtgtcgcctccaatgtcgaagttgatgagcgaacgctgggtctgggcaccccagtagcggtcgctcgggacctcgagcgggccaaaggtgtcggcctcggtacggaatccagcagcaggctggtcgtcgcacagccgggtagaagaagagacgtgcaaccggaggggtcgtcagccagccgggccgtcgagcgaagctcagcgacgatcgccgcgtcgtcggacgcaccatgacggtagacgaggagaagaggcgggcagaggggacggcgaagcgggcgctaggaagctgcgatggtgagagacggcggtgaggaaggggcgaggcacggcagaggaggaggcgtcggccggggtcgtcggggcggcgggcgagcatgtccgaaggcaccaggagggaagcagaggtatcagccgatgggcgacgcgaggcaccgggcgagatgggaaaagacggacccttcgtgcggacgatgcgagggtgcggctgagcatgagcaagagcggcctgagaggagcgaacgagggcaagacgggtggttgtgcagggcggtcaaggcagagccgaccccgcccgacggagtcgttcgccgccgcgccttccgcgtctgcgcgcactgacgggcgaggagggcattactgtccacttcgaccgacaaacttcaaacaatttctcgcagccggagttgatggcgctaacggtctgacagcgtgcgcaatcgtctttagctgctgtcaggcgaatccagggctcatggtttggcgcagctcggcagatgacgatcgccggcaacattttgctcagtcctggatgaaggctggagatccattccgtgcttgctgaatgccatctagagcttgctggactcttcctgtccgctaggaatgacgcaagcctcgagtgagcgcttgaggtcgggagaaaggggcgcctttgcggaacgctcgtgatcatacgagacgaggacgctgccggacggacgaagggcgcggtctagcggtcagttcccttccggccaagagccaaggggacggccgcggagagacgtacctgtcgcacgtggctgcgagcttgcccgtcttgaggctgtaggcggccatctagcggtttgcaggacgtaggtcagctccgatctcagctgcagccattcggggcttgcctgctcccagcgctgtcgtacctggatgctgaaactcgaaggcgaatccggcggcgagatcgtgtgcggccggctggcgatcacaagcgagtctgggtgcgtgacggatgaacgataggtgatgttgtgcgacttgacgacaaagccgacgccgcggccctcgagcatggccgtcacgacggaagggttgattggcggcggcagggcttgcacgaagcccagccgagccgtctcgaagaacccgaggtaatggacctgggtcgagaccgacgaaggcgcagtcagcacgagcgcagccggccggtctttgtactcatcggtcgacgcacattgttgacgtggctgcgtgacagaggaagggagtgtccgagaatcagtagagatgacgagctgctcaacagcggagcccgctctcacttgaacttgtcgacgtcgccctgggtgaatatgcgatcaatcgggctggtcaacccgaggggcctggagcgacgtggatgagcagcggactcacccaggcaatcggccactcgatcgtccgcgatacgtcgtacccggccttcttgatctcgtcgagcacggatcggcgcgactcgttccggtcgacggagggaagccaggacggcagcgaccggtcggccttgaccggcgcagagggatcgtacgccggcgtcgtgaggtcgccgccggctgccggccgaggaacagtgtaggacgggatgatgtcgttctcgtcggcaggaccacggactcctggcggcaggtggaacggcgagtgagggtcctggaactgcttgaggagagcctgcgagcgaccgagatggtgggaggcgcgaagccgtcggcgacctgcaggtcagtcgtaggccacggctagcgagcagctgccagtgcacagacctcgatcgaactgtcgttggatgccattctactctggcggctggcgagaaggctagggcgtaggatgggctggaggagcgttcggaggagcatgcggcgagagaggtggtcggcagcggagagatgaccgggagccgaaactccgacgacgacgacgacgacgactgctgacgcttcagcccggccgaccgtcgccgacagcactacgacattcgaggcgagacgtacagagctggcgagcgcagtgcatctacaggaactcagacgaacgctgcgcagatacgaacgaccgtcacccacaagctgctccaactgcgcgaggcgagtcgcccaagcgacgcccgacttctcatggccaacatcccatcctgttcgaccggcgaccaaaggaaaggcccttctccgacctcctctctcccttactccgcccaacgcgggaccctccacccgtcatgtcgtcgagagtgggcatgaaatcggtcaagaagcggattgctttacttcttggccttgtcggcctcctcagcggccttcttgctgcaaagggagaaagggggctcggtcagcgggcggcagcggttgcagagggagcgcaagcaggacgtactcggccttagccttgagcttgccgaacgaccgcttgtgagcgcgggcgtcacggagcgtcttgtaggcgttgaactccttctcctcggcggtgatggcacggggagcctcggcctcgtagacggaggggagggggatcgaagcagaggtcgtctcggccgagaggtcggcgtcggtcgagtctcccttcttgggcttgccagccttgcgggggaagacgatgaggcgcgagcggtaggcctggaggcgctcgacgttgagcttctcggcctcaacggctccgctacggcggcggtggtcgaccgaaatgccgaggcccttggcctccttcttgccgatgccggcacccttcagctcgcggagcgtgaagccacgaccctcgcggatcttggtgttgtaccggacggtcgggcagcgaaccgcagggcgcagcgccttgagggggcggacgccgagggcggtggccttggtctgccgggcgttacgccgggagaccttgcggccgggctggtcgagccaggtgcggacccgacgctgtaaggagcacgaggggggtgcggcgggggcggcggcagagggaggcgcaggtatgagagcgagcacgaggaggtgggcgggcgatgtgaagagcgggaaacctgcggtcagcgtcctgtcctgatccgaagctgctgagctcccccggctggccccctccctgccagctcctccggagccctgttgatgctgatgaatgggatgcgaacctgccagtccttgcggaagtggttaccgtggaggactgaggaggagcgacggggtcaggacggttgctcaagcgaggtgcagctcgcacagcgtgcggccgtaagcagcaaccgacggagacgcaccgttgttcttgccgaatcccatctggagaagccgaggtagtgcgtcaggagggagggtaagagagaggaagtgaagggtgggcggcgagttgaggtcgagtcgaggtcaggttgaggcaggcagccagagccggaacagcagcagcagcagccaagtagcaccgagtggacgaaggcgcaggcggcccagcaggcgaggcggcgagaacagcggttccagagggagcagcggtaccgttcgatagcgagcggatagatggacagcacgggatgtcagtcgagccggtcgagacgggacgagctctaggaccttctctacgaaccttgagtaaactggtgagcgagctggacggagaggctacgacgacgacgaggcggaggcgaccaacaggcccgggccgcgccgcgctcgcgcgcgcacgctcagcagcagccgggcctagggcagttacggccagcgcgcggagcggctcgaggccctcgtcacactttcgttacgccccaggcatctggaaccccagtcgcccaaagtggggttgaaaccgaacctaatgaggccctgcactgacgaccattcaagttcgagcttgcagcgcaaccccctcagcctagccgcccgctacctccagcgttgcatcgcggacaagtagatatcgcaaccctcaaagattgtaaaagctgatttgagaggagggcgcccagcgccggtagtgcagtctccgatgaatcgtaaatatccattcatctcgcccaccatcgcctgctcacctactaacccaagggaataccttccaagtccgatcctgctgcgctcctctcgctggccttgccacccgtccgcgcaaacgtatcgataacccgacttttaccctctccgtccttgtctccgatacgtctctgcgctggcggtcccgacagtatacctcccgtctgactgctcccagcgtctctcgtctctgtcagccggccggctggtgagcgcggtccactcgtgaagacaagggccttctgtgcggaccgccgggatgcagggcggccgcggccgacgatgaacctcaaggagatgcgccggcatgcagagcgtacgctcccaggcctctcgtacgagccgctgtcctgctgttacgaatgtcagtcctacttttggtcccctacgaccgtgtctctcccccattgcactcgatcctcatggcgacccaatggccggcggtcagcagggcggacgatggtcagtcgcgcagagctcggcgctagcggtggtcagtggccgggtcggcgtcgcgcgtgtgatcgcgacggcctgtcagtcacaaggtcatgctcgttgctgctggtcagttagccatcagtgctggcccttgctcggctcacggcagcggtcggcctggccgggcacaaagaaggtctggcgatcgaagggggcttgagagcaccgagaacgaccggtcgacagcaccacttttcggcgcaggccgtcgttgagtggcccgctgagccgcgagccgcgctggacctctcaaccctccgacacgacctcgcctcaaccccctcatccatgaccctcgccgctgcccgcaagctcctcaggccactttcttccagctctcacctcctcacccgatcactcgcaaccgcaaccccgacgatcatggacccttgggccatcaccaaagaaatcggcggcgaggccaacgtccgccggctcgagacgatctcgcgcgacttccggagtgcgtccccttcgtcgtcggcagctccccggacagcgagggtcaatgctgacgctcctcctcgtcctttgccttcagccgacacgatcacgatcccgaggtgcgcgatttgcagccctcagctctagtggacgaccagcgcggtcgagcgcggtcagctgacctctgcccgtttgcccctgactcctcgttgcttacgcgtgcgtccgatagcgacgccatgctgcttggtgagtctggccctatcggcggagatgtcggcgcgaagagtcgatggagctgacgaccctcgtgtgctctctccttctccgttcgccagccggcctgaaggcgacgcgcggcgacgacgtttaccacgaggacgagacgactgctgcgctcgaggatcggatcgcgcgcatgacgggcaaggaggcagccatgttctgcgtcagcggcaccatgacgaatcgtacgtctacttgctaccttccgactgacccgagctgaccctctcgctcgctgcccgcacttggccctcggacagagctcgcgctgcgcacgtggctcacgcagccgccacactcggtcctgtgcgtcacacgtcgtgccggcctcttgctgctcgatgccgtcgaactgacccttccttctgcactcgctcgtaggtctgatcactcggcgcacgtctacgcgatggaggccggcggtatctcgatgcactcgcaggcggcgacgacgagtaggtccacttgcgcgctcggcccgctgtgaccttgcttgagagctgatcatttgcaccgatacttcagcggtccgtccgagcaacggccaccaccttcgctgggtcgaggatgttgagccgaacctcgttctcggcgagaacattcacctcgcaccgacaaagatcgtctcactcgaggtacgtcccaacgcctcgtctcgataccgatcaccgagctgacgcccttgtatcctgtccgcgctttcagaacacgctcaacggccaaatcttcccgcaggatgagattgtcaaaatatcggagaacgtcaagcgcgagggcatcatcatgcacctcgatggcgcacggtgcggcctggctgccgacctcttcggcgcggacttgagctgacgcctcctgatcgatcgcgcacaggctctggaatgcggctgccgctacgggtgcgaccgtcgaggagctgccgacagtgtgcgtactccctgagcttgggttcgaggttgatcgacgacaatgggctgacccccaacgcgcttcacagaatgaaggagctgtgcgaccctttcgactcggtttcgctctgcatgtcgaaaggccttggcgcgccgatcggctcgttagtcgcatctcttctgcagtcggctgcgttcttgactgaccttgcttctccgcactcgatcagtgtcctcgtcggcccggcagcgctcatcaagaaggcgcggtggtgcgtcgccgtcgttcagctgagattgtagcagaaactagcttgactgaccgtctccctatcgaatacaggttccggaagtgcttcggcggcggcatccggcagtcgggcgcgctcgcggcgtcagccgactttgccctcacacacaacttcgacaagctacgcgagacgcatgcgatggctaagcggctcgcggacggcctcgaggcgctcggtgtccggctcctggtcaaggccgaaactagcatggtgcgtgtcgccccgggcggaccaactagatgcccatccttgatgggtgctgacgccgcttctttgcgctcctccagatcttcatcgacccgaacacgatcggcgtctcgctctcgactctcatcgcccgctccgcagcgctgccctcaccactcggcatcaacggctcgcgcctcgtcgttcaccttcagatcctgccggaggcaatcgacgagctcattgatctcgtcgccgtgctgaaggaggaggctcaggcaaagggctggaccccgccgccaccctcagtcaacggcatgagccagcgggcgccgtccgtcctcaactacgcttcgacgcccaagtagggcgcgtcggcccgaccccttgatcttctctcgcgcgattccccgtcgctatagacatgcagagagaccattccgattacaacgttgaggggtacaaggggtcgtgcagatgggataggacgagcgtgggaggtcatgaccactggaggggaagagaatcgcgtcagctaaagatgcgcgccggtcgtcgagtcacagtactgactgaggtcgcgccaaacttctcgcccggtgcgaggagcttgtaaggcgtgccgagcgcgtccgctgtgtcgttgtagatggtgttgccgatccaagactggatagagttgaggccgacggttccgtctggagcgcgaagggagcagacgttagctctcggagcacagcgtcggctcagcgtttgcgcacgaactctttggaaaggaaagcgtgaagaagatgacgatctggcggcgtgcaagcggcggtcagctgctgtagcgagctctagcaagcagtcagggacaaacgattgcgagagcgtagccggccgagagcgccgcgctgaggatgtagttgaagcgtgaccaccacgcaaaagcgtagcgccggacaactgcgagcatcgaagaaagtcaggtgatcagggtccgcagcgtttcgaccgatctcttcaagagcacgtaccgaactgagagatgaaattggtgtagcaaaagcttgagatgttgattggcgcataaggcggcacgagctgatgtcagggaggcgagcaagcgacgtgtcagtgagactggcattgatgatcgcgctgcttctcatcactcactgccgtggccgagaagatcatgggcgcgttgaaaaacttgtaccacttggccggctgtcgacgagcgagtatgtagaacggaattggggcgacggcgcccgcgaggaagccgagcatgcaaggtgcgtagagacgcccgggagaaaactgacggccgggcccgatcaggccccagatgactgcgacaagaaaaagatgtgagtggcgacgctctgtaccactgtcgccaagccagcttacctgatgcatagccaaacgtctcggcaggcgggcaccagaaattttctggcagaaggttgcgagacggtcagagaccaacgaaacggccttagaagggtccgacgtacgagatttccgcgtgcacactgcagagggagcaagatgcgttgtcagactcgaagcaacagaggctgagcgaaacggaagattgaaagcgaaggacggactgttcgggatgtggtcgaacatccactgcccgacgctgctcatcgagaaagcggcagtcagaatggctgaaagtcatacgcgagcagagcgcgatacgcacctgacttggacgaaggaggccacgatggcggcaaccacctggcctgtaaacatgattcgcggcggtacctgcacgcgccgtcgaggaacgtcaggcccggcccagcagtcggttcggtcgccagctgcgcaccttcatgtaatggccaagtttcatgtcgttgagcactgttaagccctgcgtcagggtgatgtaggagtaggtctgacaggacggcaacaaggtgtgacccaggtaggttagactgtgagcactgcaggtcctccagcgcaagtgccgcaccttgaagatcatcatggccaccggatggcctggcgcaatgtagccgatgacgagctcggaaatactacgatggcccaaaggccgcgcatatcagcatttcctgctcggttgacaggagcgtcgcaggcatactcacacattcagcccgacctgctggttggtgatagcttgaaggataccaatcggtagcgcaaagaaggcagcgatgaacagcctgctcgcgaggtttggtcagcagcgtacgaggcgtgaaggaaagggacgagcgacgaacgagagaaagagcgtccagacgggcatcttggtctcccagccgatgacagcgccgagtgctgcgacaaagagaaactcgcggcttcagcaacgaaaacaggactaacaggcagaagcgccaagacttaccgagcgcaagattgacgataaagcaggacgcataccaccattgcggaacctggtgtgcgacatggcagtcagcaaggagactcggcgggccgcgaatctgttctgtggtcaggggctcgagatgcagcgacagacctctttgtagcgccgcatcagccgggcgtggatgtcggtctcgtcgcgaagctgtcgccgagcttgcgtccagatctgcataggccgatctcaagacgtgtcagcggcccctctagcccacatgtcccgcgatcctggaacgtacgacgccgcggtagtagagcactgcatggacaaaagtggcggtgaggcacgcaaaactgcaacaggtcggcgcgggaagggcgtcagccggcccgacagtaatataaagggcgaggttagaggcgaaacatacgacaaagcgtagccgatgctgtacgtgaccgtcaggtggatctcggagtactgctcgtacgcgctgcggagggcaggcaacgagaaggactcggtcagccgtgatatgcgtgccgttttggtcgtcgacgcccactccacttacgtcacgttgagcgtcgcatcctccgtcaggatcctcgagaagttgtacgtctggcccatgttgtcgtactaaggagaaggcaggtgagtacgcgagagaccgaggtcgctccaggtcgccgaccgcacgcacgcttgctgagcccgagaagggcaggtaccaggagtcgaacgcgcccgagtaataggtagccgagtagagcacgcataccaaggcaaaaccgacggccatattggctgcgctccaccagggcatctttaggcgtcgcacgggtcagcagagacccttgcacgagacgccggaggctcgagcactcactgcaagaggattgccaatcgtcgagacgacgcccccttaaaagcgagcaagagacgtgtgagcatcagcagtcggcacgccaggaggcgctgagcagcgctcgagagaacgaacagtcaaacgtaatgaagctcaggccgagaccggattggactgaggagatgatcgcaacatcagagcgggctcgggctgtggaagggcagccgaggctggatgggtgctcacagccaaagacctggttgagtacgacattcttgggggcgatccaggtgacaaagtcgaacatgctgagggcggtaaagaggtacgagggactgagaagggaaaggggcgttagccacggcgcagctcgcccgatcgagaggtcgacgcgagactcacatccaagaccagatgaacatcgcgagcgtgacgcgaaagaagaactgcaggcaagaagcaggtgagcaagtatctctagaaactgaggatgagttaaagctcaccctgtctctggacatgccgccagtggtcgaacctccgctaccacccatgctgtgaagagtgttcagcagcgccgtactgacgagcgacgctggccagatcatttgcgccggcctgtgcgggaggcgccgagcgactgggtcagccaaggtccaagcactgaatgagccgtttgttgggggcgctggaggttgcgtaccagacgagaaattggcgcaggagtccacctgcggcaccgggcaaggcactagtcagcgcgcgagacgatcgtcttgagttcgtccggagggacagcctcacccatcgagaagccgatcagctgggtggagaggacgagcataatctggtacgaatatgaccagatctgattgtaaaagtaacgctggacggtgatgatgttggtcgcgtaggccgtgttcatcgcaaccccagacatgatcgtgatcatcgtgtgttcctgtaaggcaagcacagggtcaatgagacgagtctcgagcctttggagatgtagcggcgcaccttaatgttgaaagggcctatagagaaggaagaggcgcctcgtcagtctagagtcctgcaagcgcttccaaaggagatgggggccgaccaggattgatgaaccaatggccctcgggcaggattcgagccagaaagaggcccatcggaaacgtcacaagctggatgacgagcgacgagactgtgagagaggggtagcgatagtaaaagaactgtgagggcgggcgggtgggcttcagtcgccgtcggaggagccttctcggcgagaaacgtgagcgtgtgctacagcccgaggccgtacctggttgacgcctgcgagtaggacggatcctgcgaggccgagcagccacatgcgcagcgtgttgaccggcatcgtcgggtcgtccgtgttgcttacggctgcgcgcacctcggcgtagacgctgtcctcctcgccctcgtcaaagccccactcggaccagacatcaccgccgtccgtcgtcgggccctcagtgttggacatgtagtcgagcggataggccgacggctgaacattgttgtcgcgccaacgggccaaggtcgctgcttctcggacgagcaggctcgagtcgtagttggggtcgaactggtgggtcagatggacctgcgagagccgagcagcgagaagtcagcggcaggctagtgtaccgacttgctcagcagagacgtaccatctcgagctcagccagcgacagcgactcgtactggttgcggcctcgcaagctcgtgtcatcgtcgtcctcgaggtcggcgtccttgctgtcctcctggagcatgcgctcctcctccatgtaggcggcgatctcatttcggattgacgaagatgtctcgaaagacaaggaggtctgcgtgccgatatcctgcaaaggggtgcgagatgggcagcagtcaggcacccagcgatatcgagggtgtcgtgcgccgaggcgacgtcggaggagctgctcacgcgctccgaatcgagcaccgtccgcgcgttgagccgctgagcgagcatggacttctgttcgactggtagcgctacgccagctgaagggacggcgctctatccggatgcttggaagagagttgctgttgctgctgagacagaggcgatgagaggaggtcgacgtcggggtccagcagccgacgggctgttcagcttgcctccggccctcggttgttcagcagccggccgagaacttaaggaccactcgccgtcgacctctaccgtcacggatgctgcaacaggcgctctggagatagacctcacctctcgctcagagcccagtctgcgagtctggtgggtctgtcaggaccacgatgcagccccagctgaccgtcggctcggtcgaggcgggctcctccgaagggctgaagcgctcactgcccgagctgccagagatggagtcgtgcgcaatgctcgagaggccgcccgtcgaccgattgatcgtcccggcgctagagattgcagcgccttcgccggctgcactttgagcgatgtgtgtcatatcgacagccgaggccagaagctgaacgggctgcctgcggcgatgggggcaacaagcagcgcagtcgtctccccggcaggttctctcttgcctgtcagcaggcatcgcaccggctgtcttcgagccgcaaagacccgctttggggaggcgcaacgtcggcgtttgcgcaagggccgtcgctagagctgaacacctggcaacgcttcagggcttcagctggccgcgagctgccggcggtgcctgttgccgctcgacgggctcattcagcgacaagctcgtcgcccaatgctcaaccaagctcgaccgctacgccggcttctctccgaagtcatggcaccggcccgatcagcaaggattccaaaagggggtcgtgtcgggtcgccccgagcgcttgcctccatcgggccgccaacgccggtcctctgcttccgtcgtcgagaggtgcttcgtcccgtgtgtacagtagccggatgccgcaagcaagcagcggcaagatgggccgagctcgcctcgtctagctcgaggtgacgcctgcttatgtactgcttgcgcctcagtcgggtcgacggccaaacgaagcggcgatggtcgaccgctataacaaccccgtgccttcggccgaacgagctcctctcctctccccagcttccaaccaccaccacctcctcgaacccaactactcatcgttatggtctctctcgctctctctttggccgtcctagccggctcgaccactgctagtcctcctgtgcgtgctgttgtctgcagcgtcaccctcgacatcagccaggcaatgactgacttggcttgattgcgccccggtcgtcgacaggtgacgcctctcgtcgggcgcaacgtcggcgtcagcgccctcaacgcgagcgccgccatcccgtcggccgcccagatagtcgaccagcgtaccttcaacgttctcgagacggtcgagcctgcgagcgtcaagaatgctacgacggtgcgtgctgctcgaccttggcggcgcctggccgggtcacacctccttgacttccagctgaccggaacctgccctcactatcctcagccctttatcctcccgggcgcgacgagcgagtcgatgaaggccaagccgtttcacatctacgacaagaagttcctggagatcctaggctcgaaccctactttcaagctcatcagcgagaacacccagctgctcgcccacgaggccgccatttggtgggtcgcctgccggctcctacagcacagacagtcacgaggctgaccgagtgactcgaccttgtcaggcttccctcgacggacgacatgttcttcgcccagaacgcgggcgggatgggctctggcacgggcatcgacaagagtaacgtcatctcggtcatcaacctgaaggacgtcgccaacctcggagacggcgagctcatcaacgcgaccaccgttccgattacgccaggcctcgagatgacgaacggtgcgtctgcgcgacgttcgccgcctctggccataccaactgaccgtgattcgttcggctccggcctcggctccctttcgcaggcggcaccaactggaagggccagctcctgttcgccaatcagggccgaggggccgaccttcctgctaacctcgcagtcgtcaacccctacgagccctacaacgcgtcgatcatcctgaataacttcatgggccggcagttcaactcgcttaacgacatccgcgtgcacccgtcgtcgaaggacatctacttcacggacacgtgagttctgtttgactcggagagcgcgcagaggtgcatgctgaagcgttgactgtctcccttgcaggacgtacggctactcgcagaacttccggcccctgccgggcctgccgcagcaggtctatcgcttcaacccgtgcaccggagccgtcactgtcgtcgctgacggtttcaccaagtcgaacggtcagccccggctatctctagcgttcctgctctgcatctgactgaagcatccccttccacctctcaggcatcgtcttttctccgagcggcgacaaggcgtccgttcgcctgtccctccaagccgtcgcctgactttactactgctgaccggcctgctcacccattctctcctcgtagctatatcgccgacaccggcgccggagacgccttcttcggcttcaacttctcgcggccgtcgaccatctactcgtttgacgtcgaggacgacggaacgtggagcaaccgcaagacgttcgccttcgtcgacgccggcctgcccgatggtctccactgcgacacgaacggcaaccgtgcgtcctttcgaccgtcttgcttcttttcttattttcggaccactgactggctgctcggctcgccagtgtacgccggcgtcggagacggcatctcggtctggtcgcctaatgccaagctcctcggcaagatctaccacggcgcaggaaccggtccgtgtatcgctcgccatcgcgctcgactgctatcactgacgttgacgtcgactgaacccttgtttttgttcagccaactttgcattcgccggcaagcgtctctttgtcatggccgagaaccgcatctactttgcgaccctcgacgctgagggcgcgagctacgagtacgactacccgtcgtgcgaggctcaggaggccgaggatgacgattgaggcactttgaagcagagctgaacccctggatctatgacttatcatttccgttgaacatgaggaggaggggtggccaagatgccgggcaaacgggtcgtcatttagcaggttgttagagcgcgccgatgatcggcccctagacggcatggtgcagaaaggcgggaataattgccggtgaatgactggatgtgttaccaaaagaggtgaacaaatgaaattgggatatattgtacagctgtaagttgccaacatcaaggagagatggccgagtggtctaaggcgctagcttaaggttgaattcattcagcacgctagtcttcgggcgcgggttcgaatcccgttctcttcaaaaaaacttttgccactcgggccgaggtatcccctttggcagcggctcataagctagggtcgagagcctctatcgcgttgctcagccagtctcagaaccaacattatcgtagcggctcagagagtcgagttcgaacggcaggtcaagaaggagtcaggcagtgatctactggaagcgtggagcggagtgaagcgaagcggggcgagcaggtgggggcgaggaaaggaaggcaggaggcagcaaacgctaggagcgagggcagaggtgcaagatagactcggcgtgcgagtctgcgagagagagatgggggagtccatgatcgacaggttggcgttagtgggcaagctcaaggcgaggcgtcctatgcgcccactggcgatgagatgcgtgagcagtgacaattgtagcggccgcggaacgaggtgcttgccggtcaagatcgcaggccgaaatgactgcgcaggctgttcttgagccagagttgccgacgcagctcccggcgggagccgactgctggccagggttgagagacgaaggtggcaggtcgccgaggccgttcaaacgtgcttcgccacccactcgaaccagctcttgagcgtcttctggcgcggggcgtccatctcgtggtcgtatccgacggcgttcatcacgtgctgtcgttcgagcaaagtaagcgaagcgacgtgtcagtcaggcctactcgcgcctctcaggaacagcacaatccgcgcgagacgctagcgcacctcgtaaccaggccagatctcgacctccttgtcgaccgaaccgacctggctgatgaaccgctcggtgctcttcggattggtgatgcggtcctcggcgccgtggatcgccttgatcgggaccgtcagctcgggcgcgtggcgttcaaagccgacgagcgcgttggcgatcgttaggccggtcgcgatccggagtgggccgtggtacggctgagggttggcgaggaacgatatttcgacgcgagctgcgagagggagtgggtcgattcgcgcgtcagactcggcctgcgtgcgctgggagcaaggtttggttcacgcacgatccttgtggcccttccctcgctgggcggcggcgatcggcacgcggcccatgaacgactgaagagcccgacccagcagctcgagcgcgtaggacggtctgtgaagccaggccagggcaggcagggctgcgtcagcaggcgtaggcgaagagcgatctttgacggacgcgacacacgcaccgcgtctctgctgatattgtaatcagtgggcacatgaggaagacaccgtcgacgggatgattctccttgttgactggcgggtatttgaggagatacttgaggctacaagagtcgttcgctaccagtcagcgcataaagagaggtgagcggacacaaacgcggcgagtgtaccaaatgaagcctccgagcgaggcgcccgacaggaagagcttcggcggcttctcgcccgcggccgggctggcggtcgagtcggctgtgatgaggtcccaggcacggacgtcgtcgagcacgagctggagggcgtcgacgaggggctccatcgaccagatgtagcaatggaggccactcgaatggccgtgctacaggcagagcataggtctcaggtcctggccggcgagcttccaagaaatggtagggcaggcactcacagaaggcaggtcgggtgcaatgacgcggaagccggcctcgagaaagcgggcgacgtggacagaccacctgccgccgtagtcgccgatgcctgggggcaaggagccgagggtgaggtcagcctcttcgcgcgcaactccgagcaggcgacgaaaaggcgacgcaccatgcacgacgagcaagtcgcagccctctcctggccggccccgccggtcaacgagctcccacgcctgccaaaagacccactcgcggccctttgcccggtcgagctcggcctgcgtcagctcgacgtcctccgcctcgaccctctgccggccgtgcgcggcatgcgcgcccggcggcgcgccattcggcaacttgtcgtcgttgaccgcgtgcgcggcgggcggggatggcttgcggtcggtgaagatgcggcgtttggtcgttcggatccggggcgactcctcgaggtagcgctcttcggcgagcggcgggatcaggtagcggccgtaggtcgcatcgggcgggacgtatagctggcagcggcgtcggcgcaagaaaaggcgccggagtgtcagcgctggatgctgcgcgggctgatagcgctcgttcgaatgtgcctgggagctgacgacggaagcaggcagcaagagggagaagctgtcgacttaccccgagcgcctgaagggcaggttcgacgacgagccaggcggatgatggcacgggcggttcgagcggagagaggccgcggaagacgtcctttgggtgagtgagcggcggtggcggggcgtagaggatcgtcttgagcgtgtcgactggcgagtggagggcgagcggagggcgaggcagatggcacggcaagggcaggtaaaatgaagggagacagtcggtggcgcggcatccaggcacagatcaggcgagaggccgtcgaggaaaggcggtcatgtcagagagagatgggacggagcgagatagcgagcagggcacgggtcgtcagcttgagcgagggagagggcgcaagccattactcaagagagcgaggtgagacggcagaagtttgctctctctttccctctctcttgcggcgagtgcacggacgtacgtgcgtcggtctctgcttccagctgggagtcgtccatcgttactgcaacgagggggaggcggggaagagtcgaggtcgcctcatccgcttgtcgggccctcgtcgtcgtcgccgcgtcgccgcgcagccgccgccgctcgggcccggccgtcctcgcaaactcgcacctgcacttcctccacccagaatctcagagggcgactcctcccgcagcacgcaccccttccacttcatcctcccttcctcagcaacatgacgccctcctcgcccgcctcagcagcagcagcagaagacacgccccgccggatgactcgcgctctcgccaagtcgctcggcgggaccgactcgcccgcgccctcgccctcgcagcagcgcaagtcgccggcctcgaccttccgcaagaaggccgccgccactgccgcccagcccgttcaggaccaggagccgtcatccgggacgatcggtggcagcagcgacgacggcctcgtcgtcgtcgagcagccggcgtcgcccgaagtcatcgtcctcgacagcttgagcgacgacgatgagcttgaggccgcgcccgcgcccgccgagccgatcgaggctgagctctttgcggctagccaggcagttccggccgccgccgatgaggacgaggaggaagacgacgaagacgaggatgagaaggcggacggtagcagcagtgtcgagggcagcagcagcagcagtgacgactcctcttccgacgaggacagcgacgacgacgacgacgagcccgccgcgccggcgctcgacgacgacgcgctcgaggccctcctgagcgaggcctacctcgcagccgacgctcggacggcgtcgaagtctgctgcgaccgccggcgaggaggttatcctccagcttgaccagcagaaggacaagtgcgttgcttcctcccttcgcgcgcgcccgacgcccgagaaggtcgacaagtcgagcccgcctgaaccgacttccccgcttccctcttccctccagaccgctgccggccctgtccgtgcccgacctgcccgaggcctacttctcgatccactttgacggccgcgtgacccgtggcccgcctgccccccggacggcatcaaccccggccgaaagcaccaacgccgtcgcgtcgtcgtcgaagctcgcgccgacggcggccgcgacgccggagctcgatacgtttgcgctcccggcgcagctgtcgaagaaggctcagaaagcggtgcgttctcgtttgctgctgccgccgtccgctgctcgacttgtcgtggccgttgagttgaatagtctccagaaccaaggagtcgctgacgccctcacctcccgcccgctctttccgtccgacaggcccgcaaggccaacgcgcccctcggctgggccgagctcccgccgatacccgatgaccggcgcaaggacatgacgcgcgagtaccacgccctgcggctgcgcaacgcgctcgaccctaagcggcactacaagggccagggctcgagcaagacggtgccagaggtctttgccgttcgtccgctttcctttctcccctttcccttcgcatttccagcttgtgttgacgcgcaccgctctttctgtttgacctacagattggcaagctgtacgagccctccaaggtgctcgcgagctcgacgctcgccccggccgcggccgcccggcccggctcgatcgtccgcgatatcctcgccgactcatcctcgcgggcgtacgccaagcgcaagtttggcgcgctccagagcgagcgcgagcgcaacgggcgcaagaagacgaccaagaagccgaggcagtgagcggtcgctctgggttggttgcggcccgatgatcatgtgcatcggactcgcaagctgccggaggtcatctcgagctaggagcaggtgccagtacggtgcttattaaagactcgcatatcaggcgaggtactgcttgaccttctggaggcgctcgccggcggcgcgaagggtctcggggtccttgcactgcgaacgagcaggagaaaggccggggtgaccacgtcagcaaacgcgtcgatgcgccatgctgcctgtcaagaggaataaagagacgacgcacgaaggcaaaccgggcaaacttctcgccaatgtggacgtggtccgggctgtagaactcggaaggcggaatcgcgacgacgccgatctcttgggcgatgaaccagcacaccctgtaaaaagttggatgaagggtcagcgagtcgccccacaaagatgtccctcgaacagagccgcagacgcacttgaagtcacgaccgcggccgttgatgctgtcggggaagacgtagttggccgggatctggaagcgcgacatgtcgacgaggaggaagtaggagccgtccggccgggtgtactcgagcccgagcccgtcaaagacgtccatgaggatctggcgccgggcggcatactcttcgcgctggcgctcgaagaactgcttgtcgcggcagacctcgagaccgtgtgcgacggcctcctctgtgagggcgagcggaggggcggcgagtaggatcagtacgcctgcgccatatgctcggcgaaagcctcaatacgaggacgcacggagaggcgcgttgacgcagaagatgatccgggtcgaggcagcgagcgccggggtcaagagatgctcgggtccgagcagccatccgatccgccagccggtagcggcaaacgactctgcaggttggttgagacgcgtcgttagtcagtccgacggccgccagcagtcggcggagagaacgcggcgtcgtgctcactgcctgcactgccgacggtgatcgtccgctcccacatgccaggcagcgtagcgattcggatgtgctccttgttgtcaaaggtcaggcagtcgtactgtgtcaggcggtgaggtcggcaagcaagtcagcccgaatacgagtcagatgtaccggtcgatcaaaatgagccgcaccacctcgtcggccaggatcaggatattcttctccttggcaatttcggcaaactgctcgagctcggcgcgggtgaagaccttgccgacgggattgtgcggtgtgttgaggatgaggaccttggtcttctcggtgcaggccgcccttttggcagaggacgttggcacaggtcagtgcagactcctcctttgcgccacggacccgagcagacataccgaagctcgtcgaagtcgaccgtccagtccttgccctccggtacctggccctcggacatgttcgcaggcgggtgcagcggcacgtaaacaggcttgccgccgttgaagacgatcgaggccgtgtactggtcgaagaagggctcgatgcagatgacctcgtcgcccgggttgaggaaggcgaggagcgtcgcgtacatgcctgccgagacgagtgcacttgttagtaagcagctggggcggcacagttcctcctagcaagggcacccaccctcgttagcgccggcagtgacgaggatgttggtctctgggttgagacccttctcaagatttgtgaattcgggcgaatagtgcttggcgatagcgtttctcagacgcggccggccgcgcgggtggctggcaaacgagaggacggggacagattagcccggcccgaagcccggcaggccgccgcccttgacgcaggaagcgctaacctgtagtgcgacgcgctgatgtcggtctcgagcgccttactggcggcctcgatgaggaagtcgggcggcgcccatgacatgaacttgatgttgcagaagggtaggcgttcagcgtttgcagcgtcggctggacgtgtcgcctgagttactcacgcccctgcgcaaggagcatcggagcaagctgtcagcctcaccgagctgcagagagacacggcagatcgctaggcacgcactgtccgaggttgatcgagtccttgggctgtcaagaggagcttgacggtcagcttcaggcctgagagtcagggcgacctgagagggcgcaccatgttgaccgggctgagggggcaggaccgaatcgggcatcagcaatgcagtccactgatatcagctgatcggaggccagcaccctctccattttctacctgacatccgccgcccaggtccagagcctccctctacgaggtgcaactcggccgggcgagcctacgtcccgaggacgaagtcgcatcggcgcagcccggccggcgagctcgactcgaccccagggccacaacatcccctatcagagctctcccgctcctctcccacgctcccggaagcagcagcgaaccgacgcacgtgaagatggaccagacatcgagcttctcagcaccggcggcggcgagactcgccgatttggcgaaggagccggcagacatcgtcggcgtcgacaggtgaacgaagcggcgggcggcgacggcggcgggctgagcaaaagacgcggtcgggcgggttcgggcgagctgggagagaagggttcttgctggcatgcagcggtcgcggcgacagggacggggcaggtaacgaaggctggcgtcgggcgggctgagagtagacggctggtcgttttcgtcgcgagccggagtgcgtgcgaaggcgatttccgacccggcgccgcgcagcagtcgttcggccgacgagcccccttccaaaagcggcacgatgcgacgaagggcaggacctcttgagtctatcgcagcagcgcgctcccagaatggatctcagcgcgaaaccagccaagcaaagacagatgagggcgagcattgatcgtgcatcgcgggcgcctagtgctcgcccgacgtcgttgcgtacttgtcccgcgaagcctcctgaccaccgaagccgccctcgaagccggtcgcctggagcggagccttgacgagcgaggctgtctcgaggtcggccaatcgcttagcctcccactcgaggaactctgagggacgaaggtttggttctgtcagtcacaggtcgagaagcgtagagccgggcctcaaaaaaaagggagattgaccctgctgcttgaacctaggtaagcgcgacagcgataggagtgcaggaagagagcgtcagctgccacgttagccatgagccggcctgcatccctgtctctacgcacttctcggtcagatgcgctacaagcgcatatgtcgtcagcgtccacgtgccgaggacaaggccagcccgcgcgggactcttgggcgctaggcggaagaaactcggtcccgtcaaagctgccagacgagatagtataggcgatgtcagccggagtggaggagtggccggcagtcggggctgcgcgacgtaccaacggcaacgccagccccgacaatgaagaatgccgtcgagtcctgttcagcgacggctctaatcagcggctataagtgtcgccactcaatggcgtcgaggcctcacgagtgcggaggcggctgcgacggacttggggagcgagcctgttggcagggcacaggcgggccgtcagcaagatctggacaagagataggcacacacagacgaacctggaggcggccgagcatcattctcagcatcctgagcggcaagctctgctgcaggacttgataggccaggtgccggcaggcgctctgacggcatcgcggctacagtcggttgagccggggcagcgaccgtcggtgacggtggcgggggagggggcagcgagctgagggcaccgacggtcgcggggccggtctgcgtcgaggatccagcggacgaggaggagctgctgaaaggccacatgaggagagattggggacagaatgagtagagagggatgacggttggcaggagccggacgacgagctctctcgagcgccagaggtcgtcggtcgggcccgcaggtcgcctcgcaacgctcacctccgcaacctcgcccgaacctctctagtacccgaaagaagcagccagacgagtcgagcatgtcaggtagatgctgcgttgctctcaagtttgccaacaggtctcgaggctgacgacgcggacgctcatcccttgtcgacccgctcgcccagacgaacgcgaacagatcctggccgaggagctcgaggtcggctgcccagccgacttgccgacgaatcagctctgagactgatccggctacctttgatccttccgggctgctctgcaggttctagagtcgatctacccggacgagctggagagtgcgttgtagccagccccagcgtcctcgaccgcgacccgaggcagcttccgaaggttgacttgcttgccatcgttccctggtcgctcgctcccgactatcgtcctcagagatctccccgacccacctgacgcttctgattgagccggaagtcccggtctcgaccgagccccgtgcgcctcgccgactggactcgtccttacttaagccttcctgaccccctcattcgtgttatgtgcttgcgcggcctggcctggctctcccagtgacgctccggtttagtgtccagtacccggatgactacccggaggtcctgccggagatggatctcgagccgatcgagggcgagtgggagaacgacgagtacgacgagctaatggcggacctgaaatcggtcgtacgtcctgcagtgctgcgcccgtctgcgcatccggtcaagcctgacgtgcgcttgctcggcctccaactcccagggcgaggagagcataggcatggcgatggtcttcacgctggcgacacatctgcgcgaggcgacgtcggcgctcgtcgctcggcgtgtcgtcgacaagcagcgggcagcggacgagaagcaccagcgcgaggaggacgtacgtcgagcctgacccctgcgagtgttcaggcgtccgctgatgcgccctccgtccccccttcgaccaggcgctggccgagcggatgaagggaacggccgtcactcgtgagagcttcctcgcctggcgcgagaagttccaggccgagctcaaggtcaagcgcgacaaggaggaggaggagaagctgagggcgctcccgccaaaggagcgcgatgagattcgcaagtcaaagcacaagctgacgggtgcgcacccttctctgactttcgtcttcgtatgcttgctgacagtcacgccccccttgcgcctcctgcttccaggcaagcagctcttccagatggacaagtcgctgtggaagtcagacgcgctgctcgccgacgacgagggtgcggtcgaggtcgacttttcgcaatactcgcgcgaggagcgccaccgcgacgacgagaaggacgaggagacgggcgtcctgtacgactcggattaggatgtgctttcttttcgcaagatccgacgtcaccgccgtgatcgctgggcgcatcacaacatacagagcaggacagatcgtacacgagaggattgcatcactcggtctcgctcccactcgcacttgcgctctgggcccgcgcctcccgcttcttctggtagcgctgcagcatcgacctgtcgaccgtctgaacaaagaacatgcctgtaaagcggaatcccacggcagcgtcagtcgacggcaagtgaaggctcaatcaaggcgcgacaggacgtaccgccctcgtgcgtccatgagaccgcctggttcggaaagcggcgtgcttcggtgcgaatgatcgcgccgggcgacgaacactgtgggaagagcaggattagctgtctaatttccggctcagtcgaagcagagacgatggacgaacgttacgctcgttcagccggaagtcctgcggaacaaagcgccgcagcgagatgacgcgagcgccgtccttgagctcgagaaaaaagagcgaaaggcgctcgttgagctcgggtgtaaaggcgtagttgttgcagatctaacggagtcaaagaccgttatcagggcaggctggtgaaagagcgacgactcggtgcgactcacaacgacgtccgcccgcttgagcacctcgccgacctctggcgcggcgcaaaagtcgccctcgcggatctcgacccggccggccgaaagaccccacatggcccagcggcgctgagcttcggcaagctgttcgcgcgcgagccggctcgcgccagccatcatctcccagccccaggcttcgcagccgacctgaagcgccgcctggaggcagcagttgccgacgccagagccgaggtcgacgaggaccgatcccggcgtgagtccggtgaggccgacgagggatgagaggaaggcaggcaggagctcgccgtagacgtttgaggagaagggctggtactccttaaggaccggcaccgaagggccgacgacgcgctggtacgtctgatcggtgatgagcgaccagacttcggaccggacgccagacatgccctcaatctgcttctggatgtcgccgttctcgcggcagcggccgacgagagcgttgtaccggccgaccgcctggaggaagagcggcagcgacagcacgtttgaagcgatcgatcgtgtcaggagccggatgatctgggcgttctcggtcggttgtgatgtcgtcaacgccttaggggacgacgcagctgagggcgcgacggccattgatgacattggcaccggcgatgatgctgctggagtcgtcggccgagtgtcggggaagggcgacggcgtcgcgattggctcgcacggcggcacaaagtctagacggcagaggtaaatggcgtgtcagccggatgtatgcgcggtagatcgagtcggtagagggtgaagctgacgcgtgaggacgaccgtgatgatccggacgacctcagagatcgggttgtactcctcctgcgacctggggttgagcaggaggaagcgctcgcttgcgctggccgaagggtactcgagcgtgatgtgaacgggctcggggtgatctggatcgggcttgaagtctgtgggaggcgccgaggaccagacgggactgtcgtgtcagcgtgagagctgggcggagcgggagccacgccaatgaggcgggaggaccgacatggcttgtacttggtgatcaggctcttgacgatctcctccgccgcgatcagaccctcccaggcttcggctgtcggcttcgagggcccagcgacgttgcgggcaacgacgagattctcagcctggggcgaccggtcgcgtccttcgaggccggtgccggcgtcgtcgtcgctcgacgagtccgactcgggcaggacgcgctgttctgccaccttcttgacaaccgacgttttgcgaatttttggcggccgctcctccgccttcttagacgccggcttgcgcttaaataacgaggaggagctggatgaggccttgggtcgcgacgacgacgacgacgaatcggccgacgccgaggaagccttcgccggacgtgaccgggccggcggggcggcctgaacgaccgtccgcgtgacgacgacggccgccttttttggctgggtcgtctgcggccgagcaaggacagagagcgggccgccgggtgtcggcttcttggtgaagaggctcatgctgggttgctgtcgagagaggggcagtagtggcgaggtgacggtcggagggcgcgtgcctccaagagcgggcgttcgaggaaaggagccatttccttccgacgtcgacagacccggcctgaccacccttggatgtgcggcatcgtctttgccctctctgcagcgggtgatgcgcttgatccggcgtttaacctcgcctttgacgctctcgtccagacgagtaaggcccgaggtcggtccatcatctgcctcgtaggctccttcctctcgtcgtcgcaggacgacgacccagcccatggctgacctggcctctcctgtccttctgcggactacccgacgctcctcaggacccgattcgcacgtcttgcaccagcagacaacccgctcgggtcacgccctccgcttctttggctcggtccttcacctccgagggccggcaatggtcgcgcagcccgtcgtcggctccggcccaggaccggctgacgtccttctctggaatggccaggtctttgcagggctgacggaggctgaagcaatagggagcgacacggccatgctctggaagcgcttcgcgaacgccaaggttgagcaaccaagcgagagcgccgtcaagtctgtcctcgccggcatcgaggggccgtaagtcgtctcctccgaagtcgcacctagctcggcgccagcgctcgctgaccctcttgactttcctcgtagatgggcatccatcttctatgatgcgagtttttctgtcgcatgccatacgcttgctgatgacgctgaccccacgctcttcttcaggccgccgccgagatgctttacgtctcgcgcgacccgctcggtcggcggtcgctcctcatctcgcgtccgacagcggccaggccgcatctcgtcgttgccagtgcaagctgctcagctacgtccgactgggagtgggaggagatatcgacggacggaatcggtaggctagacctgtcgggctttgtgcgggccaaacgtcgctctctggtctcgcctggcctccgctgatgagcggtacctcgacagagtctctccgagctgggcacgcttttctttactcgccgctcgcaaactggagccacgacgtcctatgtcagcaaatccctcttctcctgcacaaggctttgcttgaccctgacttgtaattccactcttcagacgtccctttcgcccatcaacaagacgctcccttcgttggacctcgcctcgcctccgaccaatgctcggaccctgcctttggatgatgcgccattcgatgcttcagtcgacggcctcgtccaagcgctagatgagagcgtccgtcgccggatctgtaacatccccgcgcctgcttcgcttggccaggctagactcgccatactcttctctggaggcatcgattgcacagtcgtcgctctcctagcttcttcgtacgtccttctacttgtggcccttgggcagacagtttctccgaggaggagcccaacgcaggagctggcagaaagggcaagcaggctccgtgactgatcgcctgccatcagccacattccgcctgatgaaccgatcgacctcctcaacgtcgcgtttgagaaccctcgagcgctcgtcaatgcagcagcggaagccaagaaggctgggagcggcggccggaagaaggcgcgcaactcgccactgccatcggagaccagcgcgacggtcgccggcacttacgatgtaccagatcgtctgaccggccgagacgcggccgccgagctgtcagtgacggcctgatctgcgaaccccgaatctactgctaacaaggcctaccctctgcagccggaagctccggcctgagcgagaatggcggttcgttgaggtcgatgtgccttacgaagtgcgctcgttggcccgggcctcaacgatccgctgctgacccgaacctgcctctttcaggagtgccaacgagagactccacaggtcctcgacctgatggtcccctcgcgaaccgttatggacctggtgcgttgcgcgcgtcatacctgtcggctccaaatgtctgatcggttgccctttctttgacagagccttgcactagcccttttctttgcctcgagaggacgaggaaacttgcacgatggcgagtcggcgaggccatacgcaagtacggccaaggtgctcttgacgggcctcggcgccgacgagtaagtgggcccttccgacaatatgcttttcgcgtggcgggcttgcgctgaccaaacttgcaacgcctgcaggcagcttggaggatatgcccgccatcggcgagctttcgagcaaggaggttgggcaggtgtcatcgatgaggtacgatacgacagatagtgtgcgttcaggcatcgccggcggcgctgacctgtcgctcaactccttcagatccagcttgacatcgaccgcctgccgacgcgcaacctcggtcgggacgaccgcatcatctcgtcgcattcggtcgaggctcggtatcctttcctttcactctccttcatcgaccacgtctcctcgcttccgatcgagaccaagatggactttcggttcgccgagccgcgaaatgacggcgacctcgctttcggcgacaagatgctcctccgactggcagcgcgccggctaggcctggagagggcggccggccgcaagaagcgggcgatgcagtttggggcacggagcgcgaagatggaaatcgaagaccgtcggcccggtggtgcgcgcaagggatggggtgccgaggctctcggctagccttctcaaaagggaacttggcccaaatggatggctcaagaagagacgagtggactcaacagctgcatcaggaggctagcgacggctggcgctcgatttgactcgccgacacactttctggcaggcctttttcaatagaggtgcaagaccatcagcagaagtcttacatcaaggtagcagaacaatcatgatctcatgtagcgatgggggcgtaggtctaggtaaagaagggattggttggtcttgggcgaagcgtaggctatggcgaagtgcaaagcgaggttgggcggcgatacaggggtcgtgtaggctaaggatacagacggctcgacgcttccaagcgggaaagcggaggagggtaagaggcgtgaacggatacgaggggagagcgtgacacgtccgtgaggaggcaggagcaatgggggcggggcgtatgcgacgggacaggatgggcgggtcaatcgcaccgaaacaaagtgtaggggtggcgtcgaacgtcttttgcgaggggcgctgcgtcagacgacagcgttcaggctcggccgccggagatcgaccagcgaccgagaccggccttgccgccggtgccgacaacctcgaggtgaccaggcggtcggacgatctggcgcgggccgaagcggggcatgtcggcgtcgctgaacgaggccgaccgcggtgcggcgttgtcggtgaaaggccaaccctgcacattgcggtcttcgggtttgggcgtcggagcggcaccgtacggtttcggatacgtcgactggacaggcactgagcccgtctggaaagagagctcactcatcgccggcaccgggtgcgcatgcgacgacctcggcgaaggcggcgaagcaaacgtcgccgacggcgacacgagacccggtgtcggctgatgaacgaccggctgacggtgagccatcggcagtgagacgggcggattggcgtctccgtagacgctggccggttgagaggcggccgatgaccaggtgtatccgctgtgcgtgccgccgctgtagctcgacggcgacggtgagaaggacagcccggccggcgacagctcgctcgcgtggatgagatccttgaacgaggggagccggatgcccgccgagggcgaggacgcgactgccgaccgctgcaggaagccatccgagtcggccctggagtacgacggcgtgtactggccgccgacgctgccgaccgtctggagggacgagcccgacgacgacgagtcggaccggtcaaaggggatggccgctgcaccaccgaccgactgtgcgcggggcggtagcaattctgcgaacggagccgtgggcagactgctgttggtcgcagcgggcggtcgcgggtcaaaacggatgtcgatgcgagccggcgggccgatctgagagttctcgaggactgacgggagcgaacccggcgaccgcggggaaggcgcgaggtcgaccgtcaacggtgggtaggccgttgggcctgtcatgctgccccagcgcggggcgctgttgagcatgagcgtcggcgccggcgcatgcgacagcatgaacgacgagatggacggcaggacggctgctcgcgccggaggggctgctgccggcctcgaagcgacgaccgggacggtcgcccgccggcctgggatgggcgacgttgacggctgggacgtcactgggccggtcgggccggtcgtcgagggctgacctgccgctgcatcacgctcggcccggcgagccttctggcgcatgttctattggccggagaaagatccgtcagccacggcagcttaagtttccaagcggtgacgattgcgaaacgtacttggaaccatacctggaaagattatcggcgggccatcgagataagcggggaacttgtggtcagggccccatgacgcgtgtgcccacccgggaggctggtcctgaccgagagacttacctggaccttgcgaggcgggaggctgatggagaccgagagctcatgccgctgggtcgagctcggaaagtgtgtctgaatgacagggcgaagggcgtggtcagtcttaggacctttgctgacgaggaagaggaggagggtcggcaagccggtgacggcgactcaaagcaggagccgccaaacagagcggccgcccaggaggtacgtacctcgccccagagtgccatcagctgcgtcttttggtttgcaagcagcgccgtcctggtcctggagggggtagggaaaggatggcgaagaagaaaggaagggacggcgacggtcagcctcgagctgtcactggacacgggaagagcatgtcgtgaaggcgacgtttccccctgagcggaagcgaaggccagctttcgcagaagcgcaacgggagcggacagggacaggacgtaccttgggacaggatggctgttactggacgagcccgaacgctgttgcgaggtcggagaccggctgccaccggccgcactacggggtgttgacggctggcggttggcgtcctcgtcctcggatgacgaggacgagagcgagagtgtgtcgtcgtcgacgaccatgcgagggcaaggcgcggcgagaggtcgagtcgaggacgggtccgaggaggttcgacgcgtgaaggaaggaagacggacgtggtgggcgtcggcgaggaaggggaggcgttggtaccgggagcaaggaggtggcggtcggagggagcttcgaaggctgaaacggagaagactggcggccacttagcgaaaacgagggccggacgacgagggggaagagaccggtgagaaagacacgtcggcctgtttgctgcttctgagtgctggcccgcctctgcgccgctgcccccggctggcccgaaggcagaccggtcggtatgcccgatgctgcccaggagagtcggccctcatcgtcgcgtgccccgcagagggagcgacgcgccatgcctcatgtcattcgtccgtcggccgctatgcttgcatctccgagccttataagcgggtcgagcaggattccgactgctgctgctgctgcctgccgctctccgcccgctcctgcgcccagtctgttttacttcaagccttttcaccttcgacgtcccttttgtcggccgcccctaacggctcgcgtggccgcctggaaggaacgtggcgtcatcaactttggcagagacagaaacctcgtcgggcgcgcaaccaaacaatggccaaccattcaagccgtcgtcgaaagtcgcggccgcttcgggccagtcggtcagaggagccgacggcctcaaagcaggacagcccagcaaatgggttggttccgacagagaggcgagcctgacgaagaggatcgcatccaacaaggttgctcatttcgacagtcggcaggattgcgacgcggagccgccgcgcccggccgtctgcgggcctggcaggatgacagcgcaagaacttcttgccatcgcagaccaagcgttcgtctctggatacggcagaggtcagggcaggcctatgcccactcgcttcgcttggccccccggacaagggcgtcccagctgtcgggctcacgccagccgcccgccccagcccggccgacgccgaggtcgagcacgcggtcgagcacctgcgccatcgagagcgcgtcagaccggttatcgccctcgatcgagtaggcgaggatgcatccggtggcgaccggctgccgctggctctcggtcggcgcgtcgccggcgaggtcgagcttgagcaggagcgacgagaggaggcccgacccgggcaggggcggcagcaacggctggttggcctggtctccgccgctgtttgccgtcagggtcgatgacggcagaggggtcgacgagatggtgtcgacgtcgccgtgcttggccgagtaggccgggatcgacgtcggcaggtcggggaaggggatcgacacgacacgtgggagaggaagatgaaagtgctttgatgcgctgaacggttcgagagcgcgtatgtcagcaaggcagctcattcaagaagaggtgaacaaccttgagtagagcagggtcgtaaaggaagacctgtcggggacgtacttgtcgccgaggttgtcagcccggctcgagccatcgagcgagccgaggacgagcaggcggccgaacttggactcgcggatccaactgacgaagcgcgagaggaactcgtccttccggttctggtgaccaccgggcgggcaaggacgtcatcagcagctgtcagctttccgggcctcagagggaggggtcggctgcgcgcgcgcgagggcgcaccttaaggacgggcgaccgctgctggacatagaagacgttcgggtactcgtcaccgacctgcgcaaacacctcgagcggcgtgacgatgccgccctcggcgaccggccgctcggcgccgccaacgaaggggatcaggtcggacgggtcgaggaacgcgacgcgctggatcgccggcagggacgagatggcgaggtcaacgcagagctgcggcacgttagcgtagctgagaggggaccgcacgagcggagccatcagagtgtgtcagcttccttctcggactgaccaaaaagagtcagggactaacctgacgacgggcacgacgacggtcgcgccctcgaaagaggacacgtcgaagcccgggaccggcgtgacgaaggggcgaggagaggcggccgacatcgagcgttcggcgggagctagcagaggatgaagctgagctggagggaagggcgtaggcgaagcaagcgtagagaagaaggaactgcgaggaggagaggagatgatggttgacggcagaagatgatgacggcggtcgaggccgggcggccgtacccgctcgtctccctccctccgaagtgcgctgccgaccggcctgtctctttatcccaccacccagcccgctacagcaccggcactctcggactcggaccagaacggtgtagccagacgtcctcctgccgacgtgctcgctcgacacggctgtcgagagacacccactgctcgcctcgtctgcgccgcgcagggagcccgcacgcaccccctccgcgaccccacccgccatcgccgccctcgacggagggtgccgtccttccgaagcagctcttctgaagattcacttagagaccgcactgctgcctcgtcatgacgggtacctggccgtcggccggccaggaggacttcgacatggccagtctcacgtcgtccccgagctcggccgcccccgcagcggtcgcaccgacctcgtcgctagcgtcgtcgacaagctcaggcccatcgtcggcagcggcctcccagcttcgctttccatcctcctttgccgactttcgactgccgacgtcgccgagcagctcgcttgctcgcggccacggtcacgaggggcaagcggccccgtcagcgctgctctccgtcggcggtcccgtgctcaacgactacccgctcagcaagcgtcttcggcgaggatccaccctcagcatggtcaacagcacccaggacgacggaacagagacgccgcctcacgcggcgccttctagtccattcaaatacgcgccgcctctgccgcccggccacgacgagtctctcggagggccgtcacgcccgcacacaccgccaaacggcttcggcggccagctctctcatcggccctcgtcgtcctcttcatccgccatggccatctcgcccgtctcgagcaaggcgcgcttgcggtcggcgtcacctcctgccgtgccgacgctcaatcctcctaccttccgggccgacacggccggcggcctgccgaagcacccaatccaccggctcggcatgcagcgcaaccactctttcaccggcgctcgcagctcgaaaggcaagggccgcgacggtggtgccgactccgagtcgccctcggagcccgaagatcagtcgccagttctgtcagccgcgacgcctgcgctacgaccgatcacgcgccgcggcagcctctacccgaagcatctcgcgcatatctctacggcgcgaatgctcaacgaggatccggtgacgagcgagatcaagtcggaggctcaaatacagcgcctgctgcaggctcagtcgtcaacgccggcgtcgtcgcgcctccgccagtcgtcgctctcgcacgccgcgctcgtctcggcccgcgggcgctttcccgaggacgccgacgacggcgactcggacatctttggctcgaccaagggcggcagcagcagtagcagcagcgatgacgacctcggtctgatgatcgacgactctgagatcgtcccgccagcgccgccgcccaactcggtcgcgcctgccctcggccagcactttccgcgcgatcgttacccgtccgctctcgcaggcccaccgggtatcaccagcgccttcgggatggctctccacgcggcgctggcatcaaacccgaacccgcctgccgtcacgtcgacgcccggcctgctcacccacagggcggccaatctcagcggtagcttctcaggcagcgacggcgatgcgctcatgggcggcaccgcgagcccaaagtcgacgacagccagtcctgtcgggggctggcgcgagaccggaggtggccgggtcaataagcgaaaggctgccgacgacgtacgtctgcgcgcctaactgtccgaccgagaccgacgcgctgactcgctttcaaccgctcggcagcgctacgacccctacggctcgtcgttcgcgttcaagcgcagggcagtctcgccgtccaccgtcttcccgccgaacggcagtctcggtttccccccttccgccggctcgccgacagctcacagccggcttcccgcgcggatccactcggaggccggtccctcatccgccgcgacggcgcccataccgatatcgcccgcaactcaaaggacgactacgccatcctcgtcctacgccccttcctccctccacggacctgtcagcccctactatacgacctcgaggtcgtctcgcggcggctcgccggtgccgatcccgctgtcgaccagcgccggccgcatgtacggcggcagtgcgcccgggctcgctggctcggggctcggactcagcctgctcgcccgcgatagggagggccgacgaaacgacaacggccacggcggcattgctggagtgtgggaggcgaccgagggcggctttgggagcctcaagctcgggggttcagatccgcgtgggccgggacccagtgtcggctagaatgacttgtcgagaccgagactgtcgtttgcgagtgtgtcctgtctctcactaagcagcgtggaagggacagagtggcttggttcggtcatcagcgaactcatgcatcctcgacgggtcgacgcctccggcccccggcccgcgcagctcacccgccctccgagccctctcgaccaacatctccttccgacgcactcggagtcatccgctgcttcgctctgagagtagtcacatgcctctcgcctggtatgtgcttgtcctggtcgcgctctacctcgcccgctggtcggtcaacccgctccggtcgcgcgtgcctgccctgcgtcgcgtgctcgctcggcccttgccctcgcgctacgccggcgacagtcttctagagatcgtccttggcgcaggtcgaccagccggatcctcggcagcggatgatgacgacactccccgctgggaacttcagtggcacctcctcggcttcctcgtcacgacgacggcgctcaacgagctcccggcccgcttcgtgctgtcgctcgccccgcgacagacacgctcactcacgcgcttctacgatatcgccctcatttgggcagctctcgggctagcactgtgtgttgctctcctgctctgggaggcactaggcacgacggtatggctttggtcgaccttgcgagagggagctctctcggtcgagccgcaggccgccctcggcccgcgcgtcaaacgaagcctcgtcccttcgacccgccggacagactcctcgtcgcttggcggagcagtcatccatccgctggtcggtaggactggtgttgagctgaaggcggtctggaactgactgaggcgaccggctgagcagatccctggtgtcacgctaccctggtcgcacgcgccaatgctcgtcgctgcgttcctactcggccaactcgtccacgagccaggccacgccatcaccggcgctctgtgagtgatgctctgtctgggtcctcttgctcagctgccgaatatagctgactttgcaaggtctttgccagatctgggctgtccacgctcgctgcttcgttgcacttgtcgcccatctttccgtcggcttcagtcgtcctgccttcgctcgctctgaagacacttcctcctcgcgagaaggcgcgcatcgccgtcgccggctgctggcacaatctcctctttgcctcggcgctatggacaacctgcgcgctcctcaattcgacccagcgcaacgtcagcggcgtcgggcgagttgtcctgcatgtcgactcggtacgtctgttccgaagctagtcgacttatcgccggctgaactagcgctcttccttctttctagtcatcaccactttccgaggtcttgcccgttggagccctcttgacgcatctggatgaccagccgctcggcgtgcgacaggcagatggtccgccgccggtcgacccatggaccacctatctgacgtcgagcgacatcacgtcaaagggatggtgtctcgatcgtgcctcgttcgagggtcagtctttccacgccgactgctgtgtcagacctaaccctgacgtttgccgcctgaccgcagcacaaccgagcgactgctgcgttggcggtaccacaagctctgagcttcatccgacgctctgctttcggtcgacagcgttcaaggacgtcagcgggcactgcatgctgcctgacattctcacctccgtcccggctggccgtgctgcgtccgaccgttgcccctgcgctagcgacagcgacgtctgcgttaacgttgaccggcgcgaggaggtcctccgggtcggctttgtcgaggagggccgccctatggacgaaccgtcttggctgctctggcagggcgctcggcagcagattctcatacaaggtccgccgcaggacctagcagatcaagtgcggctgccgactgactcgcttcatgcccgaacagtcatcacctcggaccgtcggccgccagtcctgcttccgacctccctttatccggcctatctctacctctcggccctcaaaaactacgtcgtcatgatctctttcaccttggcaacgctcaacctccttccctttcctttcctcgacggcggattgtgcttctcgtccttcctggagtgggccttccccgataaggctgacccaacgggcgacggcagtcaatcgctgctatcgacgtccggcgatctcgacgaggaggtcgaggacggtctcggcggcgaccggcctacagctcgctggaggaatcgtgtggagatcggcgtcgcctggggcaccggtggtctcggggtctgggtgcttggcggcatagttcttcggcttgcgctgaacggctatggatgaagcgctccggctttcattgctcagagcgttcgatcaggtgtctcgttgcagccatcgctgcgcttgagcggcagacgctgcgcggccttcgcccagctcgcgtccctccaatcattacccccttcagcccgcctcatccacccactcgccctcaggatggaatctgcggccaagcgtttctttggagcctcgcactacggcgtcgttggtgctaactcagacccgaatcgcttcggttacaagggtccgtcggagcgccatcggtcggccggcctcgagctaagcgaaacgacgatgcagcgctggactgactcacccgccctctcgccgtctcttcggccagtctttgcctggtatctccagcgaggtatcccggtgacccccgtcactccatccgctgctcaagtcaccgtcggagccgagagctttgcgacgattgcgacggtcggcgagctcccacacgagcgagttagcctgtcgctcatcacgccgccgccagtgacggcccgcatcctcggcgaggccagtaaggccggcgtctggggcgtctggctccagccagggacgtacgacgagagcacgctcaagctgctccaggaggatgactggtgggagggccggtgggttgcgggtgaggacggcgctagccggggccatggcggctggtgcgtgctcgtcgatggagaccgagtacacaatgctgccgcccaaggcgagacccatggccgcctgtaggtcttccggtgagccatgaatgactatcgtcatcttgctcgctgcctgcgggatgccggctacgggagtcacacgcgagcggcggtagagccggccgacgacgctgcacttgcgctcatccgcccttactttctttcgagcctacgtcagactcgtctctcagccaagcctagccagctctgccgacctctccagcgtcccgggcggaatgcagagtctgcaagccgttatctgtcgttatcgcccgactgcatttgctctgggcctcgaacggcacttgcgagttcgggccagaattcggacgcagcgcaggcgaccggcgcgaagcagccccgccgctctgacctgcgcctcggcaactgctccccttgccctccctctcctagccaccaggcgtcgagcgagctccctgccaatcccaagctttcagagaacgctctcaccgacccgcccgtacctcatcttcaccggagccgtcacgatggcgtcgacctcgtcgtgcgtctcttcgtgcctccaccccgtcctcccgtgcccagcatgctcgagctcgtgggcgctgcaccagaatgacgactgaccagctgtccatcatgcttcttagagctccgttttatgtcgtcaacggtgcgccgggccagagctcgatcccggcatggatgacgcagcggtccaagaatcgcaagggcgcgaagcggaccaagacgcagcgcacgctcggccacgtcgagctcatccagcactgggagttccccgaggcctcgctccgaatccggacgacacctgatgggcatcacgcgatggcgacaggcgtctacaagccgcagatccgggtctttgacctcgaccagctgacgatgaagttcgagcggcacacggaccaggagaatgtcgactttctggtgcgcccgctgcctccgttgcctcctgataaacgtgaacgcctgagcatgcaggctgactgtctgtcgtcccgcgcgcccccttcagcttctgtcagacgactggaccaagtcgcttcatttgcagtcggaccgtttcgtcgacctgcacacgcagggcggcatccaccaccggacgcggatcccgcactttggccggtcgctcggctatcacacggcctcgtgcgacgccctcatcggcgcaacgggctcagaggtctaccggctcaacctcgagaagggcaccttcctcaacccgctcgagatgcaggctggcacggccggcgtcaacgcggtcgacatcaacccgcggcacggcctctgggccttcggtaccgagcgtggcgctgagggcggctgtgtcgagttctttgacccgcgcgcccgcaaccggatcgggatcctctcgctgccggccgagaagctgcggccgctcacgacggcgacaacatcagaattggactacaagccccttgccgtgacgtcgctgtcgtcgaagcttgacggcctttcgctcgccgtcggcacctcgaccggccacacgctgctttacgatctgcggagtcctaagccgtttgcgttgaaggaccagggctacggcctgcccgtcaagcgggttcagtggctcgaaggcggcaaccgggtcgtcaaggatggccttgttgcgagcgccgacgccaaggtcctcaagatttgggataaggacgaggtgcgtcggagtcccttgtttgcgctactctacgggtgtcagctgatccaacctgtcatcatcttgcagccgagcaacaacttctcgtcgctgactccgccgaccaacctgaacgacttccaccacattcctggctcgggcatgattatggttgccaacgagggcgtccacatgacaaactactacattccgcagctcggcccggcgcccaagtggtgctcgttcctcgacaatgtcaccgaggaaatggaggaccaccagggcggcggcatcagcaactaccaggacttcaagtttgtcgagcggtccgagctcgcgacgctcggcatggaccacctcgtcggcacgcctcagctcaaaccctacatgcacggctactttgtctcgctcaagctgtacgacgccgctcggctcatcgctaacccgttcgcgtaccaggagcatcgcgacaaagtcatcaaggagaagctcgagaagaagtccgagtcgcgcatccgggcccggcgcgaggagacggacgtcaaggtcaacaaggagctcgccgagaaggtccggcgcgaggaggagcgtcgcgcgcggaagcgcaagaacgacgtccgcgacggcgtcgaaggggccgagggcgcagctgagccggtcggcgaggacgagcagggtccgggcgagagcgtcctcaccgacccccgtttcgccaaggtctggacggacaaggagttcgaggtcgacatgggtagccgcgagttcctgctcaagaacccggtcgccgcgcctgtcgtacgttcgcagcgaagcgatcggctttgcagctctaatgcgttcgacgctgaccgacattcaactccttcagaagcagaagacggtcgtcgagcaggagcaggactggtccgaccgtcactcgtccgacccggacgacagcaccgacgaggaaagcgaggaggccgactcggacgacgaaggccgtgagtcagaccgcaccctcccgtctgctcagcacaccactgacacgtttccgtcttcgtgccctcgcagagctcatgccgttcgacccgcggacgatgcccaagtcgcagaaccccatgttccgcccgcagccgaaagcgcagccggggccaaagccgcagctcgtcgcgctcagcgccggccaggaggagcgccctgtcagctcatcaaagtctgtctcgttcggccagcgcatcaagaacaaaacacaggaggcatccgcgtccggctcaaaggcggcaaaggccgaggacccgagcatcatctcccgcaagctcctcgccgacggcggtatggagctctcgttcatccccaagtctggcccggtcaagggcaagggcaagcaggtcgagggcatcgtcgaggacgattacacgccggacaagggcacgctcgcccgcgaggccgcgcgcgagaagaagcggcgcggcatcgaggagttcggtgccggcatggagcgcggcggcgaggaggaggagcatgtgcgcgaggaggacaagcagggccggcagaagcgacggacgggtggtcgcagcgcgagcggcaacacgttccggcgtctgtgatggtccacttacgcgcgcactgctatctgcctgtccagcaaacgtctcgttcaggcccgcagaagacgagtgcaggggcagagtgcacgcagacggccgtcagcagacgagcagggagctgaggccgagggaacctgcagtctgccttcacctcgtggcctcgtgctcgctgacaaccacctttccttcgctcaggcggctgctcggcatagaagtgcgaggagacatgcgattgagacgggaaagcaggcaaaaaagggagactacggagactccgggaacggcgggaggcgaacgaggcagtaagaagaggcggcggctctcgcccgcttctagataggcggggcgagggaagggggagctaagagggacgtaaggtaagggggctcatgggccagtcgtcggcaggcggagccagagaggacggagggaggggcgaggggcgagggatacaacggggcgagaaggcgtgagagccgccggtcgaggccggcagctcagagggcgagacctggaggattgggcgagaggtcggcgtcggccctccaagcaaccgcaggcttggccagagcgcggccttggggatccagaaagtcgacgtagggtagaggagcaggccgttcaggagaccctcgggcttgccggggggggcaaaagtctatgatttgaggccgaggggataaagaggttggtggatgggcgtgtgagggcgacggtggccgcggcgtgcgacgagttgcgatgacagaaagacggccggaggatggtgtcccgcctcccctcacttcttcgtctttgacttgaggatgtcaaagcccgtcttcttctgcggcccggccggtttcggcggagcgggcgccggtgccggtggcgggagcgtcgtgaacgccggcaggccggccgaggacgacgtgaacgagccggccgaggacgactcgcccgactcgctccgcctgcgctccatctggtcgagctcgccctggacgacgatgccgccgagccaaggatggtcgaccatgtcgcgggcctgggcccgcttgtcgccgagcaggttgagcatcggctggaggaacgacgcaaagaggtcggcctcgtccttggtcatcccgtacttctccttgaggaccgacgtcagcggccaatagcgcagcttgtggatgtgcttgagctcgcccgtcttcttgaagagctccttcgagtatcggccgccgagcgcgagcgacctcgggacgtcaccgaggagctcgataatctgggccatgtggtcgtcgtccttgtcatacttggtgcccggctgggggtcaaacaggtagtcgcccgtgatgagctcgaagatctgcagtgcaaccgcaagggagcaaagagggtcagcacgattcgctctatgcgaggagcgggaggggaagacggacgagggcggcagcactccaattgtcgactgttgggccccaaggtgtgccgatgatgatctctggacagcggtactggcgcgtttggatgtcgtttgtgaagtggtggtggacccagcaggcgtttccgagatcggcaatcttgacggtgatgcgctcgagcgaggccggatcgtacggcgccggcggcggcagcgtcgacgggtcgcccgcggccggcgccgggtggtagtcgggcagggagcgcgcgccggcgccgtgcgactgagggatgacggagccagggacgagcgactcggcaaggcctggcgggagcgcgccgagcgccgaagggtggaggctgtctgtcggcgcgccgccgggcgagggccgcgcgggcgggtcgtccgagaccgagagggtcgacatgagcgaagtcgagacgccgacgggcagctgagcagtcgacgccatcggcgtgttgggcgccgagatgagctgctcggtcgacgacgtgccgttgccgttgatcgtcggcggccggccggcgctaagccccgagaagcccgacgagccctcggcgtggtgctcatgcacctgctgcgagaggagcgagaggtgcgacgtctgcgccggcgccggcggcgtcgccttcttgaagaagtcgtcggccggcgacgccggcggctggccggccgcgccgttgctcgcgcccgactttgaggcggccgccatcaggctcgccgacgcaaccggcgcgggcgacgagtttgagatggacgtcatgccaaagttgtggcggtcgagcattgagcctgagccgtacgagctgctcgggctcggcagcggctggctgccgacgatgaagatgccctcgcgccggggcgtctgggtcccgccccggccgtggctcggcgggacgccgacgagcttggtcggcaccgcagctggacagctcgcgagctcagccgcgacgaccgactcgacgtcgtcgatgcagatcaagacgttttccggcttgaggtcggtgtggatgatctgacacgagttgtggaggtagtcgagcccgagcaggacctgcttggcaatctgctggacaatgtgcggcggcacgccccggtgctggtagcgcttgatgagaccgagcaggttctcgccaaggacctcgaagaccatgcagacgtgcgagccgttcgggccgacgtgcataaagtcatcgagcagggcaacgacgtgtcgccggcccgggtggttagggtcggccgtcgcgagcttctggacgagctgtatctcatcgagcgccgtctcggtgtaatggctgtcggacttgacgaccttgagcgcgacgtgtcgcttgacgctgtgagggtggacacgagggaagataggtcagctacggcgcgtcctggcgagcttgggcagagcgaccatctcgcccatccctcgagccacagagccatctccggtcagccacctgtccccagcacatcgtcaccccatcacctgctccatccagtgcacctgcagacaacgacggcgaagggcgtggcaaggaggcggacgcactgctcgtcgcgggccaaccaaacagtcgaaaagtggccccagccgagcttgcggacgacgacgtagcggccgtccttgaacgtgtcgccaatcgagattgggtgatagcctcctggccggtactcctcgaggtcctacaggcgggtgggcaggcgacgagcggcgactcggtcaggacgacggacgggagaggggggcggccaggggcggtgtctcaacctccccgaccagagcccgggcgcgtccccttgcgtctctctcggaagcggaagcaagcagagaacggacctcctcgtcctcggtcatgacgctcgttgccgactgggacgacgacgggtgcgaggcgaccgacgacggcagcgaggcgcccgggtgcgaggtcgcggcggctgaggggatgggctgaggcgcagagtgctgaacgtcgcgcgcagagatgggccggccggcgacggaggacgggtcgagcatcgcacgcaaggtgacgacggcggcgtgcgatcagagggcaggatgaggaaggcaaggatggaagagctccggtcagcctcgagcccatcctatcggtcagggaggcttccctcaaccgagcgagcggcgattggcgcgggcggcgcgtgggcggcgcgcgagcggcgacggtcgaacgcaccgagggcacgggcacagggcccgagcttgacccgagaggaggcatctgggtcattccggcctttatgctggaggaggtggagtgtggagggctcgagcgagatgaggcttgtgggagagagggagttagcggtcgaaggaagggaaggagggagggctggtggaggagcatgtgccaggcggcgcgaggcggaatcagcttcgacggctcctgtggaggtgcgagcgccgacgtgtctgcctgatgagacgtacaccgggacgagtcgggtgacgagatgggagagaaagggtgcggattgccgatccgagagagaggtgtaggggtggccaggatgaggagaggaggagaggagcggatgaggcgaagggccgtctcccgcgtcgtcgggcgaaagagtcggcggcgcgggaattggtcaggaccccctctatcgacgatcaccaaacgtctcgtctgcctccattaagtcaagggccgagctcttctgctcgcgacaggcatgcacatatgcgagagaccctgggcagctgcgaaacactcgaatgactacgatgcgtgacgggtcgttctgcggcggctgcagcgctcgcgcgtgcgtctctccgccttgtcgctcgttcagcccactcgcgtcggcggcgccggcacggtcggcaacagaagggcgatgcgtcgggggctgaaaaggcatccaccctttgagggtcgacagccgccggcccgcattcgccgagagagaggaacggaaccttctgcgataacgcttcaaccatcgagtagggttgcttcgacggctagcgagtcggtgatgcactcacgcatgcatctcctctaatcagaagacgcctcgcacacgcacgcacgcgtccgaagacttgggcgagctcaaaattagaccgcactcccatcaaacagtccctgactgctaccctcccgacgaatgccgaaaaagaccctcgggctctctcttcccgcttttgttaagcgcgtcattctacagctcgccccccctaccgccgcccttgacgaaagcgagcgcgctcgcgagccagcgcccgacgccgccggcccactgggagggcgagccgagcccaaggccgcgataccacctgtagaggacgaaggcgccgagcgagccgaagctcgcggccgcgagcgccgttggcaggcgggggatcaagctcgtcgacgacttggcggtgatgtggaggtttctgggagggtaccgagcggggtgggcgggtgagggtcagcacgacggaaggggttggcgagcgaccgggcggcggacgcacgggttcatcgcgacccggaccatcgccgagaagacgtcggctgtctggcctgcgaagggcaaagagacagcagtcagaagggcacgcaggtagtgctggggcgcgcgaacaagcgactgacccaaccggacgctgaccgagatgggcaccggcaggccgaggcgtttgcagtagacgtccggctggacctcatgccgctgagtcaaggcgtgcaaaatgtcaagtcagcgagatgcgtcgaggcaggcagaggcaaggtcgccaacgcacctgctgcgccagatcgaggtccgacttggtcgcgacaaacagacaagggatctgatgaacgcccttgtactgctgccttaggttcgagatgtaggaaaacgagtttgtgtcgctcgagtcgtggacgtagacaatgacgtcggcccgctcaagctttttcggattccggagcgtctcggactcgtagatcgagccaaactcttgcagctggggtttggtggcgcgagcggatcaggctgggtgtcagtaatgccgttcaatggacaagaccagcggcctgcacgacgcaccacgaggtacttttcgccgccgcctcgctcgacgccgttgacgaccgacgtcacccggttcgtcggctcccaggcgtcctcgaagcccttgttcgcaaaggcccggagcagggccgtcttgcccgagccggccgcgccaacaacgtagacgagaaagacgttgcgcgtcaccttgcccgctcgccgatcctgtcgccgcgggcgcgtcaccttgagcgcgttcgtcgtcggctcgtccttcgaggacggttgtgatgggtagccgaggtagcacaggtaggctagcgtaatgcggtggtcgagcagcgtcgtcatgctggtgagaggcggaggggatggtcagcgccagcgcgatcaggggcaagccgaaagctcccacctccactgggcgagccactgcggggatgcaaagagagcaagtcagcgcgaaatacgtcttggccggacaagtcggccgacgcaccccttgcagcgtgaccttgccgagcgacgtgacggtcgtgtctgggaagccggtcccaagccacgggttgcctggcgaggtcgagaagacgtcggccatctcggcctcggagagcgcgccgtcctcatcctacgtcgagtcgcagagccatgtcagtcgagacgacgcgcgatagcgcataagcggggtgaagcacgaacctggtcgaagatctcaaagatctcggttaagaactggtagccgctcggtgagagctcgaccgagcagtcgtacgggacctccagtctgtgcgagcaggcgtcagcaggcataacgttgtagcgaaagcaacagctcgtcggtcgactgactttggtcgcaggacctcctccttaagctcgaggtcctcgccgtagccaaagcttaagagaacgatccagatggtgtctgaaaaagcaaagccgagagcgacaggtcagcgtgagaagagcgagtgatcaagctcgctgagggacgtaccgactcggccctggtggatgaagcgcgtgtggaagtagagcatgccctcggccgtcatgccgccgtcggtgaccatcgccgggtcgtgctcggcaatcatccgaaaaagcgtgtcgatctcttgcagctgcaagggcgtgtcaaagcacttgcgctgcgaggacgaggggcttgccaggtcagatgagtcacggtagacagtggaacgacctgatcggacgcacctggaaatcattcagctcggtcgggtcgaggacgccgtccttgttaacgtcgcagagcttgaagatacgccgcagtgcgtcgacacatttcggtttcagggcctgcgaggagaggggaggcgtcagcgctggtaagagggcgctgagcggacggcaatcggagcgcacatgttccctcgagtcatacaacggcgcaagcgggtagcagacggccttcagggcaaagaagatgacctcggtgacgttgagcatcgtccgggccgacgtttcgacgcacgtctcgacctcctgagggcggcacagggcctcgttagccggtcagggtcgaggaccgtacgctgcgcgcgcgcgccaacggaccttgaactcgttcatgatcggcatgatctcctgctcgagatcctgatttgtcacctcgccgccgcggaggtcgatcttgttcccgcaaagaatgacggggacctgagtagagcgagaggggcgttagacggtgctccggcccagtgggtcactccgctcgactcacgttgacgccctgctgccggatgtaaggcagccaccaggccgacaaccggtcgaacgacgccggctggtcgatgctgtagacgatgacaatgacatgagccttgcgcagctcgacgtcaaggtgcgagcgctcggccaagcgggctgtaggcgggcgaggcagcagaggcgtcagcttcgtggtctccggcgcgcgcgcgtccgacgactcgacgcggagcacgccagggccaacgtcgaactggaggacgtacaggacgagtcgacaatcgacgccgtgacaccctccatgcaatccgggatggtgatctcgggcagcactcgctggatctaagtgagtgccggccaaccggaggcgacgcatcagcgccggcaaaggactcggcacggcctccgaccggcgccgcaggcactcacattcgggacgaaggaccgcttgatgaactgcagaaagcaagggacgtcagcacagcacttcactcgttgaagaagctccaggcatgagctcaccgaggtgatcaaggtcgacttgccgacgccctctaccgggacattgcggaagcggcggcagccgtcaaagggtcagccctcctgagccgagctcgtccggtcgagcacagggccgaggccggccaggcgaagggacgtaccgtctccgacgaggaggacccggacatccctccgcatgctgctaggtcgtgtttgagctcggccgtctgcgtccgggcctgagagagggctcctttcgggtttagagcttgagtgccggtcgcagctggccgcggagctttccggcccgaggagaggtaggtcgagagaggtgacgggccgcctagagcaaggaccggggtacaggcggataccggagcttggcagtagcgagcagaagggtccgagaaagaaggggtctctaggtgggcaggaggcaggtcgaggcagcaagcggtggtcggaggtcggcgaacgaggttcgctgcgggctcgatgcttctcgttttgtgccgactcgaaggactagctgtgacctctctcccgtcctcgccatctccagcatcaaaacgccgacctggacgacctcgcagcgcacaggccagctctctcctttaaacagcgtgccggaaagatgaatggaatcgaggtcgacatggtcgacatctcgtcggtcgacgagctcgacctgatccagtacgagccgaccgagccggtcgccccgctgccggcactcccgcagacggtcgtccacgagcccgagcaggcgttggcaggaccgtcgcggacgacgagccggtcaagctcgcccctggccatgcctttaccggtcgccgctccgctggccgcatcgttggcgtcggcccgcgtgcactcggacgcgtcggcggcccggtcgtcaacgagcagcctgacgcccgagccgccgctcgccctcgccctcgctctcacgccgaaccagttacggacggcgctcctgtacgacgaccggatgctgctccatcgtgagatctacaacgaccatccggagcggccagagcgaatcggcgacacgtatgcgaagctcgagcagcgcggcttcctgaagcgtctgcggcggctgccgacgcgcgaggtgacgagggacgaggtcctcctcgtgcactcgctcgacccttgggaacgcgtgcaggagctctatggtgcgtcgggagactggccacatgctctgcgacagcgggccaaccgggctgacccatggcctctcacacttgtatctgctgcgcgcacctccagacatcgacgaatcatacgtccgtgcaacgcacatggactacgagaacctcagcctctacatctcgcccgacacggccatgtgtgccaagctctcgtgcggcggcgtcattgagacggcgctcgcggtcatggacccgctctcgggcatcacaaacgcctttgcgctcgtccggccgccaggccatcacgctgaacccgagcaggggatggggttctgcttcttcaacaacatcgccgtcgccgcccgggtcgtccaggagcgcgccagccgcagggtcaagacggtcatcatcgactggtgagttgcttttctcttgtgctctgcttcgggccgggagttgaccgccgcctctatctcagggacgtccaccatggccagtcactttagcctcaaagtcggcgataaacgttccccccctgtctgacgccttcagtctctttgtttttcaggcaacggcacgcagaaggccttctatgacgacccgtcgatcctctacatctcggtccaccgttacgatgacggcacgttctaccccaactcagactatgccgccaactggcgttgtggcgtcggcgagggcctcggcaagaacgtcaacgtcgcctgggggcccggccagaagggcgattcagactacatctacgccttccagcgcgtcatcatcccgatctgccaagagtttgcgcccgagctcatttttggttcgtcctgtccttgacggcgagcggctgcgtcgggcatagggagctaactcgatggcccatatacgtcaatcgcagtctcagccggctttgatgcagcccgaggcgatccgcttggcggctacgacgtcacgcccgaaggctacggctacctgctgcacatgttgaacggtctcgccaatgccaaggttgtcgtcgcgcttgaggtgggtcttcctcctggtataccgccgagcgactgttactgagtagctctgacctgcctgcatccttgcccagggcggctacaacgtcgacgccgtctctgagagcgcgctgacgtgcatcaaggtcctcatgggcgatggctacggcacgctgccgccaatcgtcatcagtgacctcacccggcagacggtccatgaggttgcgcgcatccaggccgcgcactgggacgtcattgacgtcctgccggttgagccaaagagcggtcagtctcgccggcctgccctcgaccgaagacgtgtctgaccctcgcctgctttctcgttccagactacaaggccgtcgccgactcgctcaccgacttcacaggtgcgtgctcgcccttgccgcagtgcttcatgctcgtccgtccgtccgctgaccatcacgctcggccactcatttgcagacatcgtcgccgcgcagcgcagcaaagatctgcacgagaaatttggcctcgtgccgatgccgctcgagaaccccgaccttaggctggccttcctcaacatggtccacctctcgttcgtcgccaaagccttgccgtctcgtctggcagacgccgcgctaacctcgccttctcgtcaggcgcgacatttttacggccccgacgatggtcctcttccttcacgacctgtgagaaaccatttcgatctcttctcgttgcctcctcgattgacccaagactcatgcgatgactcagaggcaacatcaagatgagctcggctgccgcccgtcacagcgacatggatttgccgggcgccttcctagtaagactagctctacaccgctgtttcctgactcaggtcacccgttgagcctcttcctcaattcttcaggtcgacccttcgcatcacatcgtcgactggacgctctcccgcaatgcagagactgccctcgcacgcggccaagagacgagcctcatcgacatctgcatgccgaagcagctgacgacggcgacggtcggcccggttcgaccttgacgactcgatgggaggcgtgattgagcgtggctgctgacgcctctgatgctttgtcctcgcctctagctcaagaagggcgtcaaggaccagtaccggcagatcatcacacacgtctgggacaacttggtcgagcaagtcgaccgacggcgacgacgacagactgtgtgcaaacccgctgaccgctgcgttcttcttgtcgctttcaggctgaccgacgtcaaggacatcgtcatcattggccacggcacgggctgcgaggtgcggcagacgtgtcgttctcggttccgcgcagaaggactgacacaatgagctcctttcgtccctgcaggctgtcattcagctcatcaacactcgaggtgcgtcgctcgtctcaagctcctgctctctaccagctgaccctgcaacctcctgtgcagacgttcggagcaaggtccgcgccgtcgtcaaggtccacggcatggacaacctgacggtcgtcgatacgggcgatcccagccttctgccttggtttcaagaggtgcgcctcttcctctttgcacgccgaaagcaggctacgagactgacaacgccggccgccgcagacggtcacctcgatcgtgcccgagggccacgtccagaagatcctcaagaagcacggcccagtcgagaagtcatgtgcgttgcggttctcgtcatctggcttattgcggcggccgctgaggccgtgttctcggtctctgcagccgaagcgcgcccgctctttgttctacaagactcgctaccgcgcatcaagtcgtttgttgctcggaagctcttcccccatgccgcccctcaggccgtcacgctcggtctgccctcggccgcttccctgctccacccgtcgccagtcgtcgcctaggcggatacgcgggtcagatcgatggccttgccactgggcacgatgcgtgcaagtcctcttggcgccccttcccgctcggacgagggctcggttcaagctctgacgccaggacagagcgccgtgtagaggagctgtagggcttgaacacagatggctctgcaagagactcggctcgaggttccagtctgcatgcctgcttgggctactgcgcgattgagatgcaagggggcagcgagcgaggcccttcgcctcttcctcgacgcccaccccgctgcttgccctcttctctcgtccagtcatagcccgagattcctctatctgtcagcttcctgagcaggcctcacggctcgagcttggtattacctttgccgcctcggataagcttgacaactcgacggtcgctccttcaaccggcaccgacttgcatcgcagctccgacgccgcctccagcccggttagtcctccctggcttggtatctgattgaactgcggcctggtagagcagtgctgacagtccgcttcctttgacattcagccagtcgcgctcgactcgagctcgccgcgaatgaaaggcgcccgggacgggtcgacagggggcgcagcagccgtcgcacgcatcctcccggtcaagcagctcggctcttcggcccaggtggtgcgttgcgagcctgctgagcagctctgagcttgctctgacgcctcttcttgctcactcgcgttgcagtcggagcaggagccgccgccgccgtcgacttccaacttgcttgaggctccggttcttggcgagccatcattcggcccgccgccggcacgtctcaaccactcttggcgcctttggccgacgactaacgaaattcttacttccccttacaggttcgtgccgagaagggcgtcgtcatgcccagcctactcaagccagctgccgaggcgcacccctcggtccgtcgccctcccctatcgagtagcaaccgctagcttactcctttgccctttttcatagcccttccaaattggcgagctcacccggcacatcctctccttcgtcgagctttacggggcaaaaggacctacctcgagagcctgctcatctgccaaagcttttttgagtgcctctcgcctcgcatctactcaaatctcgacctcatcggtaaccagcgtctgagcaagtttccttcatccatccgccgcctcaatacgctccacgcgcggaaaattcggatccatcgactgtccctggggctttcaggctacaaccggaacgagagagtgtactgtgctctcctgatccacctcacgcagctgtttgctgagtcgcccggttcaactgctcagctttcgaccctcttcctcgagtccaatcctcagtggggcgacgccaaaaattgaaggcttcgccgccgtcctaccgggtctgattgacctctgcccaaacctcgcgaccctcgagtggcaacgacgaaggcgactgcctgtacgtcatcaaggacgtcctcgatacagtgagcaaccagagccctctgaccgcgagtcggctggagggtacgctcgtcatcaagatgacggccgcggcctacgtcaacgcccacgccggaactcatcccgtccgcctggacaagctcgcatttcggcccgcagccctgcgactgggagaaagtgccttctggccgttcgactcgtggacaacgctgcaggagccggaaagatcgatcgaccgcatgtccctcgccttcctcctgactgtcacgtcgcatgtcgctcttcaaagccccaccgccggactgtcgttctcgcccttggtcgagctcgacgcctcgctcaaaggctccttcgagaaggcggatgagcgcgaggagtgggcaatcctcaagcgttcgtgcgcgagcggccgcacgcgctgccgtaccacatcgaatctgcgccggagctcggcgacttgacgggcctcatcgccgaccgcctcgccgagcacggcatcgacgagctcgtccaccgctggaaggttgcgaatgacgcttgggacgtcgttggcgaggacttgtgggcgatgacagactgggtcgctctgtgtgatgactgccttttcttagttcttgcctgcgctgcggcagaaagctccggcgaggagggagcagtgagaggtacggttcgtgggcgtcatccatggctctacaagacagaaaaaaagggaggccgtgagagtacaagcaagcgccggaattttagagaacaaagaggtcgatgaaggtgaggcaggaacctagatgacgatcacaggaatccgaccgggcccgccggctccagtcttgcggttccatccgccgtcgccgggaccttcgaacggcgtcgcgaggaggtcctcctcggagccggcagcggaagacccactcggcgagaggtagatgtctgtcggcgagaatgtcgacggcagcgacagcggggtcggcgggatgagagctgctgtcgtctgcgcagccgggaaaggcgacgacggtgccgaggcgagccggtgccgagcgaccatgcccttgatgttgttcgcgaaccagtggatgtgactgcgagtcggccgggggtcaaaggtcagcaacgattcccgagagaaagacgactgcgaggggccacgtacaggacgagcgcgagagagatgagcgcgacgacgccccagccgacgacaggcttctcggcgccgaaggcctcgcgcgtgaagcaggcaagcacccagctatggaacgcgagccgggtcgcgccgaagacggcggcaaagaggcgatcgtttcgggcctttgggacaaccgtcccgagcgcaaggaggaacgtcggcagctcgaggaaggcgcagagggcaaagatgtaggcctgcgagctcgcaagcgcgtaaaggacgaccagcgtgtagaccgagtgatgaacaaatccggtcaggatcgtgatcgtctacaggaaaagccaagcaagaggtcagcttgggttgtctgctgggtcctgcagcgtgtgcaagaacgcaccccgagagcatggccggcgacagtgtcctcgaccaaaaagacgccaaagacggcgcacatccacaccgccgtccgctcatgcgtctcggccgctaccttgaaggccggcacgtcgcctccgcagcgaatgaagacggcgacgaacggcagcgaagcgagcgtgaggaaggccgacgaccagagcgtaagcacccagcctcgccgcttgggctgaagggccgatagctggcgcgggaaggaacggagtgtcgcaagatagagaaccggaaaggtgacgagtgcgacggcgacctgtgcgatggccatcgtcgggagtgaggcggggccggtggatcagaggcaggggtggggagcggaggtggccggcggcggaggggcggcgagtgcgacaggcaagctggagggcggcaggagcagtggacagccctcgaggtgttgcgcttgaagacggtccgagagagctgccccagcctactagctgtctggctgtccggtcggtggtggttggggtcgacgagtcgcacgttccgaggcagcaggtgcgtcggtcgacaggggcgagacgagacgaagcctggcgccgaccccttgaacctggcctccgctgaccgacgtgcaactctggatcttcctctgactgaccgtctcgcagagctcaggagaggaagatgagggccgtcctttgacagcttcccttcggcatgctggacgcttgcgaaagggcgacctcaggaagtgcggaatcgcctggacctttcccttcgtcagtcgcgacgggcctccctcccctcctcgcaagaaggtctgtaatagaacatgagagaaggcgagatctgtcgtccttgagcgaccggcaagctggaatacagggtggcagttattgaggataggcgaggagcgggcattaacgagccgactagagcttcgagccgcccggcgtcgatggccggtagagagcgtcgacctcggccgacgtcggcaaaggggtcttcgcatacttgacctgaatgagagccagagtctgtcaggggcgttggtatttggcggcaacagcaaggaggacggaccatctcgagctccttctgagtgaagccgcacttctcgtagaagactgggagggtcattgaaatgagacgtcagcgagacaggtcagacattcgcagctaatgttcggcacgcaccgacgttctcggcgctgcagtcgaggatcgtcttgtagcagccgagccgctcgccgacgccgacgagcgcctggatgacgcgcaagccgagcttttggccctgaaccgccttcgagacggcaatgtcctcaatgtggccgacgagaccggcgtctggcaagatcagggtccgaggagactgtcagcagagcgcgaggtgctcaggaagggtgagggcttagacctactgcggatgaacttgcgctcgatgagaagcgtgccggtgccgacgagcttgtccgtcgccttgtcgacaatgactagccgggcagatagatagctcggaatcagctgacgcaacctttgctccccgcctctgttgcctcgaccaagctctaccggagcagggcagccgaggcgaggggtgacaaacaggggtcgtgccgagctcagactcaccgagcgcatagtagcctcctcgccggccgcggcatcgcatgtcgtcaaagacctcgccgtatgaggcggcgtcgagctcaggcgcctgcgtcaggacgcggaggagcgtgaggtgacctctgtggtggtcgtcagaggcgagcggccggatctgccggaggtcggtcgcgagacgaggcgcattgttagcgtcgagccagagcacactgagagcctcccagagccaaaactgcactcacgtggtacgccgatgagagggctgaggctaccgtggccgggatgagcgacggcgggaaaaggagcgtgagccggttgtcgggcgtccagctggcggaggtcgaggcggcagccatggtggacgatgacagctggcaagagacgcggagcgcggaggagggagcgactggcgaagaagtgcgagcggcgggtcggacgagcgaaggacaagggctgctctatactgtagagttgtcgagcgagctggcgaggaaatggtggtgatggagaaggctaggaaggccgttgatcgagccgacggcctgaggttggccaaggtgacgcgcagcggcccctgctctcagttcgctggacgtgcgagcgtaaggtcactcgaagaccctttgctgtcattgcagtggccgtggatctgagcggctgatctctgaacggaaagccgagtattgaaaaagaagcaggatcgatggcgagatgacacagggcaagtacaagcgtgtgatgagtgacgaggaaaaccggctggagatgcttttatgggagcgaggcgacgtctaagtagtgcacatatgaagggcggggagaaggagcccagagaaagaagcggaaggagggcggctttgcagacgcaaagagggccggtgtggcctgttctgtgcagcgcttagcagtggtggtgggcccggcgctcgatggctggaggaaggggcgagcgcagaccgtcagcgactgggacgctaaagcatcgagcaggcagaattgcccaggcgatgctcacctccgccgataaccttgccgtcgatgaccgtggccttgccgacatggttctcgagccagtccttgttctcctcggcgttgagcttctcggtgatgacgtcgacgtcgaggcccatcgtgtcaatcatgaattggccgagctcgacattctcgtgcgagccaatgaggacgttggtgagctcatcgttgccgtaggcgtagaggctgacgtcgacggccgagtggccgtgggtcgagaaggtgcacatcgtccggcggctaagagagtgagcgaggtggttgtcgatgaagcgcgccgagccgttgttggcgaccgcgagcgaaatttcggtcgcgttggcgtcaaagatgccgtactgggggaagatcgtgttctcgacgtagctgtgagaggggaggttggcaaagagagacggtaagcgattgtcgggcgccaggtcgaccgcgaccacgacaggcaggctgcagggacgcactcgttaaggttgtcgcccttgtacttggcgagctgcgagccgaggaactcagacgaatgaacagccgcagatgctgcctgggggagccaaccgtattccggcgcctagggagagggagagggagagggaaagaatcagcttgcggcgccggccatgtgttgaagcgaaggggagacgaacctcgttaaattccccaccagcgactaggccgccgcactcgtggtcggcagcgctgatgaggacagtgtcgtcgtcggcgtcgatgaagtcctggcgatcgagaaatagaagcaagggtgagcagacgaaggcaacacgggccatgttcaaacagcgcaccttgatgacctgaatcgcctcattccaggcgagaatctcgtggatgtggccgacgaggtcgttcgagtggccggcgtggtcgatacgggagccctggagttgtcaaggcgaggtgagaaagggctagagtctgcctaaccagggaacgacgcacctccataaagaggaagaagccctgctcggagtcctgagtggcggccttgagggcgtggagcgcggtagaggtcatctctggcaaaggtgagggggtaaatgtcagctaacgatcagctgctgagggagcaagagctgaggcgcacctgcgagcgagggctccttggtcgcgttgcggtcgacctcgtacgacatgtggctgggcgtgaagaggccgaggaacgggagggtggcgttgtgtccgccgccaagggcgtcaaagccagcacggtcctggaagacgctgtagccgttggcggcagcgtcggcaaagacgtcctcgccgtccttgcggcacgagccagtcgtcgtgttgggctggaaccagcaggcgccgcctccgagcagaatgtcgacagtatggccgagcggggtgccgccgatgagctgctcggcaatccggtcctcgaggtcacggtcgtacgtgtgcgaggcgaacgcggccggcgaggcgtgggtgattcgcgaggtgacgaccatgccggtcgtgaagccctgggctttggcggcctccagaactgtgccgagcgggctggcgtcctcgtcgacaccgttgccgccattgtacgtccggaccgctgcgaaggaggaggggtcagcaccaaataaaggggctctccgacgagggactggtcacacaccagaggcgtaagccgtagcagcagcggccgagtcggtgatgaacgagtcggacgagcgggtccggaccgagccgatgaggatggtgtcggcggggagctgggcgtgccagtcgaggccgttgacctgctggtggtagtcgcgcgcgatcgtctgggacgccgggccgaaacctgagcgtcgagggcgagctgaatgtcagccagatagatgagggcctcgaggaagtaagagcttaccgtcgggaagggagaagatgaagttgcggacctggagtgggtagcgagaggggaatcagtcggcaaccaaggcagagattggcgggagactgcgcaccttcgacttcttgccctgcgacggaagcagcggctggccgtacttgttcttgccctggccgacgtttggagggccgaagctctgccggctgccgtcctcgccctttgcgttcttgggcgccgtcgaggcctcccagacggtctggagcggggccgggaccgggcaagtgttggtcggcgcagcggccgtctcgttcgcggccgactggcgcggaaggagctggttgggcaggtaggcagcctgcgtcgtctggagggcgaggagcgcgagcgccgaggcggacaggagggaggcgaccatcttgcgagggagggaaagaagaaggtagagctggttgaaggacacggtaagcgggcgatctctcgtcggccgtttggccttttgagggaagccgtccgggtcagctggcccaccgtgcgtgctgggcaaaggtcggcatgaattgcgggcggtcccacatggcccgatcgggcatcttttacctcttccggcgtcgcggctcagcagaggggtcagctcgtggctcttgagcgggaaggagggcgggaaaaaggagctcgcgctgagcagtacctactaccttcttatgtgctcctggtgccgaccgggcagtacaaggggcgcgagtggaccggtcagtccaccagtctcgagacagtttcctcggtcccggccaaccctgttcgaccggcaagagagcaacaaggctagggcgcccatatccgaggcgagccagtgcttggcgggggccaacgtgcgggagcaaccacgagcctgcctggcagaaggcgatgggcccgacggtgcagggcacctcagagccagccgctgcctgcgtgggtggaagagcattcgcaccaacgtgagcgagctgcggctgctgctgctgtcgacaggaagacggtcgtgctgcgaggcgaggggctggactagctgctgcctctggctgcctgcgtgcccttcgcagcgcgacgacgaggacgaccaatgctgccctattcaaccctctccgacgaggatcagtcctgacagcgacaatgcgtgatcttgcagacggatctcgtttcttctcctgcatgccgagtgcaaggtaaggtgggtgagagtacgctcggagggacggcggccgagctcgcgcagtcgacctcgccacggcatcgcccgccagtttgctgacgcgcttgtcgctctgatccctcgccccgaccttgggctgaccccgttgacatccttcctagacagacctgactcaactcgtcctgtcagcgccggtcgttgctgacagctttaatgccgccatctgatcaaggtcactgggccatgaggatcaccgccggccgagcccccgcctcgtccttcttcaagaaggctcgccccttcgggccgaacgtactcctaatcaccaccctgtagctcccgatcagctcctcccctagtcatgtcgaaagagctcgaaaacgtcgtcatcatttgtgcctcacgtcgccctccctctcgtggtgcttcgggcccgagcttgaggctggcaaaccaagctcacgccgagttcgcctgccctgcaactgactcctctgcctcccgaagagccacgcaggcgctactctcacccggcagctcgagaagaagctgcctgtgacccatcgcctggtcttggtcgatagccaggtgagttggatcgagctcgctcgtcgagcccatctgcgactgactgcacccctcgcgacccaggccttctcgttctacccaattgcggcgctgcgagctgcagtcgtccctggatgggaggacaaggtctttgccaagcttgaaggcttctacacggacgacccgcggcacgtcatgctgcccgagacgcgtgtcgtcaagcccggcgacggcttcgtcgagaccaaccgggcgaatgaagcccttggcttcagcactcgcatcgacttcgatatccgtccgtccgtcctggcctactctcgctcgtgtcatggctcgttgaattctgaccgacgcgccctgcgccctccagattgcggtcatcgccaccggctcaacctacggctcgccgatgcggctcattgccgactcgctgcaggctggcaaagagagttagcgctcgctccagcaagacatcaaggttgcgcaacgcatcgtccgcatcgggggcggctcagtcggtgtcgagcttacgggagagatcacagagcgctatccggaaaagaaggttacgatcgtttcaggttggtgctcgtcctcactcgattgcagtgtgcactgcccagcgctgactgcctgcgccttccttcaggtcaagcgagcgtctcctgagcgacaagtggccgacgaagctctcggacaagctcgctgctgaactcaggagcacgggcgccgagctcatcttcggccagaaggtcgctccgatgcagctcaagcagaaatcgggcccggtcacgctcacggacggccgcgttctcgagggtgcgcacgagatggtggcgggaaagaccttgagacccctttctgaccgactctagcttctttctgtagccaacctcatatttgccacggccggcatcacgataaacccgcagatcgtaaaggctgccgctccgtctacgctgaatgaagcgggctttgtcaagcccaatgagtatctgcgggtacgtttggagcgcccgtgcttcacttcggctacaggtaacctgactcaacctctctccccgccgacaggtcaactcagaagacggcccctttgcgacgagcacctacttcgcgatcggcgacgtcgctgactcgccagggcggtcctacaggcctctctgccggcaacgacgccggctatgtcgccaagaggcgcgtcttcatttttctttccctcgtccggaccgttcggctgacagcagccggctcttccagcatccttgccttgacgtcgggctcgcagactttagcaaaggtccctccgccgctccaggcgctggtcgtccccctaggaagtaagaagggtcagagcctcctcccggtggtcggagtcctcggcggctgggtcacctctctcaataaaggcgactcgctcttcatcgacaagtttcagagcctccacccgtcctggccctcgtcgtcagtgaggaacgcgccctctgcgcctgccttcccttcaagaagttgcccgacgaggagtcctccctcgcagtcttgacgccgtttcggcctcgtcaaacgcttcgacgacggtcattcttccggctgtcggcgctgtcgctgtcgctgtcgccctcgccctcgttcacttcggcctgctggacaagagccgtctcggtcccatcgcgggtctcttctagatctctctcatccgcatctcatgtcatattacttcacgccttttcgcttcttccggggaacgcatcgtcgacagctacttgcgtgagacagacaactcaaaggagggcgatgggagtccgcatgtgctgcgcgtgacgaggggcgtcgtctgcagagctcctccgcctcagtcccacacgcttcgatccatcgtccaacccagcagcagctctgtttgttgccaaagagggaatcaggtgacaaatcagatcttcaggcagctaacgagtgagtcctttgtcgcgatgcgtcgctctgcgagtcggcagcgagctgatcaggcctgccctcctcctcgaccacctcgcaccagacggttggccagtctgaacgcgacctccctcgccagtgccccattactgctcgctcgatatgtgcctcttggcacacgctgctctgccactcgagctccagttcgacgtcatccatcaggtggctgagggcggcgtctcgtcgacaagccgcgagaggcttcagctgcttagcactctctgctcggtctgccaggcctggaaggtacgtcggatagctcactcaaacgaggtcgtcccgcgctgatcaacggccgcctgtgcgtcgcccctaggcggaagcccagcctctcctctttcgacgtttcacgacgacgagcccggcccaccatgtccggctgcttcttcgtgcgctccacgcgtacccgcatctgcggccctacgttcgctccgtcacctttgagcggacctctcccgaggcggccgacgacttcttgcggaacctacgtctcgtccccaacctcgagcacctagccggtctcgtctggccgttcgaccccttgctctcgccgccagaagctgagctcaggccggagctgaagactctgtcgctcgacgtcgacgccgctgcggccggcgtgtcgtcgctcgccgcttggttccgactcgatggcctgcagagtctgacgacctacgccgccgacgagccgttcaccaacctcagcttcctcgccgacatccctcacgacgtcccggagctcgcctttgtctttttctgcgtgtcggcttacccggacctcatggctgaactcgccggccggcagggcctcctgcaactcgaacttttgccggccgacggctccttgctcgaggaagtcaacccgcttgctctgctgcccggactggaacggctcaaatttcggggcgtcgaggatctctcgtcgtttctcgctgtcgagcacccaaacatcacgcaccttagtctgagcgcccttcacgaggcctgggtggtagaaatacctcaatcacatccgcttcagggcttcgtccacgacctctgccgcctcgtcgacagggagccgaagcattacccaaagcttgaggttgtccagctcctcgccgaagacttctacatttcgttcgaagagggctaccgcttcacgtcgggtgccgcggacctcgcgcgcaggctgcgccgttccggcctccgcgtgctcgacgaggacggcatcgaatggcaggacgagtgggttccagacgacagcgacgacgacgacgacgacgacgacgacgactcttcgtccggaaacgagtcgtctgactcgtcctccgagtgatcgggccggagggctgcaacacatctgatgcaactttcgccttgctgccgcgtgtcgactatcagcccgcgcaagaacgcttgctgcttcacgagatttagcgaccggcttcagcggtgacgagagaggctctgctcgctcctggaagtcggcgggcgacgctcctggtgagcgggcgtcagccgcagtaccgtccacacccaggccaccggccgcccttggctttttcgtgtcgagggagggcgcatgacatcctcccttctcgtcgctacgctgtgccgccccagccgaggccaaagaggccgcccctcggcggcacctgatcgtcgggatccgccgagccggcggcctcgcgcgccctgcgctggatggcctcgcgttcagcctcctcgatgacggcttggcgcgagcggtcgatgtcgcgctgcttgttggcgaggtcgtagatgagcttcatctcgcgatgccgcaggcttatcacagagtgcagagggagcgcgagccgtcagtctcgcgccgaagcagctcggcgtcgcgccttgacgagctgacgtactctgcgaccttgagcttccgttcctttgcgagctccgcccggccagcctccgtctccatcatctcgatctgccgcttcgcattggccgcatgccggacggcatccttcgcggcgaggtcggcgagctgcgcctggccttcggccgagcgcgaccagacctgacggtcctcctctgccttggccgcccggtagtcgcgctcgtcgacgtaggtgaacatcagcgccgagataccccagtagcccgctagcgtagtcggacgccgtcgattcaggcgtgatggtcaaagaggtcaagagggtcagcgatcaagtcctggttggcaggagaggagacgcggagggaaggtaagggaccgacctatgctgacgacagaccagaagaggaccgggatggccggccccttgcgcttgctgatggcaagaatgctacgcggctgaaccatacagaggcgggtgtgtgtggaagcgaaggtcgcggtcgaggtgagcaggcgacggctcgcacgaagcgggccggagggacgaaggtgggcggcggcgcggggactccgtcgttttgctgcgcgccgaggaggaggtcgagctgcaggccagggcaagagagtcgcccgtcaaagacagccgtcgcaatgatggctgctagactaggtttacgaacatgctggctagattctcctgctctcctgccttctgcgtcagagcacctcgagggaagctcgagccgtgcaggccatctggcctgcgcctggctgtttggcgggcgcgtcgactcggcgggcgaggaaggcgacctcgagcatcgccggctctctcaccgccaaccacgttgaccaacctcactcgctagtgtcttattgtccagagcttcagctgtcctctttacacgcacacagagagacgccacactcatgtcgctcgacggcccgcccccagacgaggaggacgaggacgaggaggacgacgaccagcataaagcctgggagacgcgcgcggccatcgcgcacttgctcggtctctgcgaggcgctcgagacggtcgagcggagcgcgagcgcgagcgaccaccgccggacggccctctcggcgaggcggccgagcgtcaaggggaaagagcgtgaggggagtgaggcggcggcgggcagggcggccgggacgtcgccgctccaagcattggtgcgtgcttgccttccctcctgcctcctttctgtctgtcgccgccgagggcggtcaggaagatgacagcgctgacgacaccactttcgatcaccttggcagcacgacaacctcgtctacctcgtcaccatgtaccgtcgtggtctgctcaaggcgaccgacccgcccgtgccgctgccgacctcgcggccgcccgccctgctccagacgacggggacgccaaacgtctaccgcttcggccggcgcgttgcagaccacatcatcgagcgcgaatggctcaaggagaccgttgcaacctctacagacgctccagaggacacgctcgtcaagagtatcgccgttcacgcgcgctacctcgtgcgtcgcacagcctgcgagtcggttccgctttggttgcgagtactgaccggtcatccgtgcccgacagctcgccctcacatcgcaagataaggagccgctagtggccatcaggcatctccaggccatcctcgccatcaatgcgctctcgcatcctgacgccgtcgaccttgcacggtcaacccagcgtcggctaacgagcctccaagcgcggctctcccgcggaccgtcagccgcacctccccaacctcctacgagcccacgcttcctcgatcccaagacggcctcgcctcgagcggcgctcggcaaggcgccggtaggtttgccttttccccggagactcaggccgaaccagccgacggcgagtgtcagcacgacgcacacgttcgcctcggcctcgctctcgcccggctcaccctcatcatcggcacacagctcccttccagcgcctcctcgaagccgtcacgcgagcgctccgcctggtagcagctcatccggtgccagcctcgcgggcccctctttcgacccgcacggcagtcacgccaccggcggcttcacttcgcgcatgcgccgggcgacgtcgaccttctctaacatgacggccaactcgatcacatcgctctcgccctcgctcttcagcctcaagctccaggacgagcggagcgaccaggcgccgtgtctcgtcgacgacctgctcgtccatggccagacggccggcccgtcgtcgcgcacgagcggtaccagcacctggggctggtttggccgcaagagcgtcgccgagggcagcctgcggaatctcgcctcggtcaacggacgggttgcgagcccacagacgacgcgcgtgccgatcccccgggcgacaaagtcgtcccgcccgccggtcccgtcatcgttcaaaccaccaagggtgacggtcgatagcgtcgcgccgtcaccggccgcttcgggtcgaacaacgcctttgaacggcatcgctggagaaggcagcagcggggtgcaaacgcccacgttcaagacgcgcgcgtccgatcacggcgacaagactctcgacccccagctgcgactgctcgagatgagcagcaaggtgacgcgcatggccgcctgctccgtctgcgggaccgagggcgtcaacctgccagagtgtccgcgctgccggctcctcttttgctcgcgaggctgccggatcggcgaggacgccgctggcgacggcaagtgagttggcctgatcttcgcgcccgcccgagcggtgaagttttcgcggctgactctttccgaacccttccagaagacacatttgcggcgtgctcgagaagcgtcgggaggctgcggcctgagaccacaatctatgtctacatcacatggcgggtccgatgcaagacagggcaccctgacgctacgcagcgagaccaagctcgggacttgtccactggtaagcctcggcgacactctcgccgcgctcgtctcggcgcccgagctgcttcgtcaggacctcgatgacggcctcaacgtcgacgtcaaagtcggtcattccgtcggcggccggcgggaagctcatcagccggtagacttgcgagagcagtgacgcctcctcgtagaacgaggcctcgtggatcgtctcgggctggaactcgagcacgagcgtgttgggcccggtgaagcggtggtggtacaggctgccgccgtgcgggccgatgactgctcggacgttggtgtgcaggaaggcggccatcgcggcgaacgactcgaaggccgtctcttcaaagatgagcagctcctcgccttggccgcggctgacgaggagcttgtcgatggcagcgaggagagcgggctcgttgaggaccttgcgactgctgttggtcgtgcggccggtcgtgcgcgaaaagtacgcgatctagacgttggcgccgagacggaaggttgatcaaccgactgggtctgtgcgtatgcacggcgccggcagtcgaacgcacagtcttccggttctcaagcgggacgggcacagcggcaagcccgagagtctcgaccgcgccaagactgaggtagggatggacgagcggcgtccgacagctgaaaacgacccggtcggcgctgacgacgctgcgcgagtggatgtgctcgttcttgctctcggagaagccgagtagggcccacatctcctggactttgagattgccctggcggccggtcacgactgctcgccctcggccttcggcctggcggggagggatcaggtgtgcgccctgctggacgatgtgcgtcgaacggtcgagaaagtgctgccacgagtaggcgtccgggctgtgagcgacgacgagcgtgccgacgtcgttcagaggcgagggcgtgactttggcctgcgtcgcggacaacggttcgttgactccggccgtcgtcgtctctgggacggccaggttgagcgcggccttgtcgcacatgcacgcccgttcggaccagctgtcaaaggagatatcaatgttgaccgtcgcgttcgtgaagacgaggttctggccgtgctgaccgcgatagacgagccagtcggccttagtcccgccgacgagcgtgccgcgctcggtgatgccagcgacagtcgcgagccaatgagcgcggtcgcgcgcgccctgccggccgtggaagagcggcgcacggagttgaaagtcggtgtagatgagctcctcgccgatcgttcctgggtgcgaatgccgagcagcgacgcacggcgcaaagtgtgcaggagtccggccaagatggcaggtgctgcacaggcgaggacagatgaagcgtcagcgtagagggaatgagaaggctctcaagtaggtgacgaacttgagaatgaggggtgaccaccgagtcgaaagaagctctcgatgagacgagccggacgtagatgtcaggatgacgggctggtagttaatcttgtcgagcggaggcggcggaaggcgcgaaggttgaggagcgaacgacagatcgaccatcacaggtgtgctgatgagactacttgctccgttcgactgccagccgacaagcagggcgcctgcggtaaaagccgctaagagcgaggcgattcgccgccagaacactcgcaagccgagggccaaagccggccgctgccatcgctcgccggccccgcgagctgctgtcggggtatgcgcgcgagcgcgcgtcgtcgggaggagcgacatccgggcgaggtcgttgtgcgtcgagtgagggtcaggcagccggaagaggtcgtctgcgagcctagccggccagaagctttcgacagccggagtgacggcaggggtcagcggttttcgatatcagctccggatcagctcgggaagcgcctgcccatggcgctgggcatgctcgcgccccttgaatctccacgcgggggcaacgaggtgacaggcggaggacagaccgacgggccgacagtagttggcgcatccactcggcccggcgtgaccggcttgtgactgagatatcagcaggcacgccagccgcgtaagaagaccctacgcgcgtctctcgactcgcacgctcgcgccggctcgacgctcatccacccgctcgcctctcttccggacgacgatggcagccaagccgcctcaggcaccgacaaacctctcgcgcatctgggccaagctcggggccatcagggaagcctcaaagcggacctggcatgacggtgcgcccagctcagccgccctcctcgcgactccgacctgacatgccgcctgcctccgccgattcgccaggcgcacgactcggaccggatccgaaggtatgtcctcacgtctggctctagagcctcgttcacgagctgacgaggtaccatccctttccgcagtactttaaagaccctctccctctagaggtcttccacctcgccgcggccgaggacctgccaaagatcgcgctcgcttccgactctgaccttggcggctcgtcgcgcatcgacctccggctcggtgcaccgggcgaggcagacgagagctgggcgatgaagggcgtcccgtacggcgtcttcagcgggcgcatgtcgctcgccgttcgtgaggaggtccagggccgcgtccgcggcggctttgtcggctggcggaccaaggtgcgctgccgaccggatgcacagagcagctcagcgtcatgctgatagcgtacgttatctgtctacttcagccgatggtcggcgtgttcggaccggcctgctacaacctgaagcggcatactcacctctcgataccagttcggcctgggggtgaccctcggctctggccgcattggatgttcaacattcagacgaagggctacgagcccgatagtgtctggtcgcatcggctcgggatcaccggcaaaggcgagcttggaggaggatgggaggagtgtttggtgcgggcatcagccttcagctcgtcacgcccaggcgcttctgctgctgaccgcccagcgctttctgttccctttacgctccgcagattccgctcaagcagctggcacacctctctcgtggccgattgaccgaccgtcagacgtacccagatctcgacgtcatcacgacgctcggcctgtcgctcctcgctgcgcctcgcgtcgaccaggaccggctgacgccagagcaggcgctccaggcgcggaggtcaccagagggcgtcgagggggagtttgagcttgccgttggcccgatgcgaggtgtctacaaggtgcgaccctgcgggagacgatggccgtcggttgacgactgtgtcggtgcccctgaccactcgctacgcgcgcccttcgcagacgccgcacttcatcaacttccatcggccgacgtactatgcgccgccatcgacgctctctttttacgagcctccaccgacagtcccgaccctcgccccgtcctttgacgaggccaactaccggtcgacactgacgcccacgtttgcgcgcggcaaattcccggcctacgagcacggctacaagggcccgctgcccggcgtcaagcaggagtcgccgaggcaggcggtcgagggcgggccgagtacgcgcggcatgggcaaggacggcaagccgttgagggccccgccgtcgtcgctagctccttcaaagccccggacgccagggctaggcgagccgccgccgccgcaaacgactacgaggaagaaccttgccctctcagaggaggaggttgcgcgccggctcgagaaggagctgggcttgtagcgatccatgttgatcgcaagagctcgcaggtcgcgccccttgtggccagcctcgtccggtcgaccttgcatccgtcaaaccatctatcggcagatctcgcgtcacacgccgccgctgccctttgatcgcagctgcgccctcaacatctggacctcgtcctgaagggcgttgacctcttcgagcatcgcgatgccgggtccttgcatgtcctttgcgcggaactcgtcgagctcctcttgcgtctctagcagctgctgccggagatggccgagcgacgactcgagatgcgcctggagcgagcgcttctctgccgtcgccgaggccgaaattgacattgcccgctgggagagagccctggaacgagcagcaaggcgtcaggtcaaagttggggcggcgcagcgggtcaggggcggacgcactcgtttgcttctgacagcgagtcgcaggcctccatctgggctcgcagcgaggcttccatcctccgcttctcgtcgcggagctcggcgatggtgttctcgagctcgttgaattgagcgaggctgccggcggcgcagcaagtggcgcaaggtcagctacgacgcttgcctcggcgggcatctggacacgcacctgtcggaccctccgcctccgccctcgctctccaacctctcttcgagcgcgcggacctgccgttggtacgtctcgagggcgcctcggctctccatgacgagtcgttgtgctcgctccgagttgctcttgtgaatatcgcgctccctggcgtacttgccggtccgctcgacgacggtcagcgcgtcctcgacaaagcccttgagcctggaagagaaagcctctacgcccggatacggcgacttgttggcggtcgagaaggtcccaacgaagtgggcgaggtcaaagtcgccggctggctgtagaccggctgccctggctgatgaaaaggacgcgttcgaccgagcagagcttggtgtcggtgtcgattccgagggcaacagcgtccaaaggtgcgagagcgtggcgttgacgctggccaattccaaggtcgaggaggcatccgtcgatctctggcgccggtgttgggtcgacctggaggaacgggagcctcgtcagcaggagtccaaggctcagttacaagtccagggcgtgtgcgcacagctctttgacctgccggacgaagccactgcgctcctcctcccaccggcgctccttggccaagtggtcctgcaaggatctttcggccatctgtttgagtcgttcgcgctcgaggccgctaacgtcccgcgtctcctggatctcgcccttgagagcctggacctcggcatcgagcccttcgaaggcgtctcggacgacgagggcgagttcttcgagcgtttcctcctcgacggacgatgtccggtcgagcagcggggcgaggattgaccgcacgccctcgacgccctgcatccggttgtcctcttctcgcgtccggtaatgggcgtgcttctcttctgcgccgcgcagatggccttgaagggcttggatgtcgcgttggagcgcccctcgatcctcttcggcctggttgctctggccctcgagctggcgctgggcgtgcttgagctcggcctggacgacggcctcgcgctcccctgcgtcgccaacgaggtcctcgagctcccgcacgcgagcgtttaagcggtcaacctcggcgtcgagctccgtctcccggcccttccctttgctcgatgccgagtcgctgcggtcaagagccgagggtgccgaccggccaggtgggtacggctgcggcgtcgacgaggcggaccgaagagcggtctgcaggcggcttgactcccacgtcaagatggaagcgtagtgctcggtcaggcgtcgacgaaggctctcttcacgctccttgacagcccacatatcctgggaagatgagatgcatgcaggatcagtacgacgactcgctcgacttgagcgcgcggcagactcaccttctcggcggaggcggcgcgcttctcggctatcgccagctcctccgtcgtctggcggctcatcctgcgattgatagcggcagtcagtagatagacccttggcaatgcgctttaaggggaccgacctcttgtggttgacgtgcagcccggcgagtgttcgcgcagccgtcaagatcttctgctcgcgttgatgccggctgacgaggctttgaagtcggttctcgagcagcgcaagctccttcaagcgtgtgtcgaggtcagcgtcgacacactgagggcaacgaggaaccggacggaccttcttcgcatcctcgacctcgtcccagccaaggacggcgaacggcaggtcgcgcacgtcgaccgcggcctggccggctaggatgtccatcatgagctcggtcccacctccagaggtcgagccgctcacgcgagtgtcggtcgagaacggacgcgaatgcgtcgagcgtgggccggtcgagctgcccggagcgccgttcgacgtcacgcccgagtagaccgagacggacatttctgatcgacgctcgtcggtcgcgggcacgaggctcgagagtccagtcggcagaggtgggagtgtccgcgaagggtggaagacgcccgggccaaggagattgggagaatggccagtcgtacctaacggcgagggcgggtacagggcggaggcgcccgaggtcgacgccggcgatgacggaggctggggcgactcgggcgacggtggccggacggtcggctgaggcaagggcggaacaggctcaggagggttccgcatgtacgactggccgtggtagagctggtcagagaaggacagatgagcagcagtcagcttctcgacgagactcgtcactgcgccgcggacggtagaggaggacaagggggagagcgcgtcctgcgagctgctgcctcgtcgtcgtcgagacgcactctgtctccatcggaattagacccagcgttgctccgagagcccttgccgaacgctccggctcggatacggccgccgctgctcgccgagtggacgctgccggtcgggctgagtggcgaaggaggcgcgctggcggaagcggcggcaggatcgccgtagtgatcctgcgaggacgagcccgaaggccacgagagctcgatgtcgccagagggaatcgaaggcagctgtggccggctcggagcgtaagcggccatcggccagagacgagctggcggcgtgccggaggggaattgcggtcgggggaggtgaggtcaagggcgcgagcggtcgtcgacctttgacgcgtcttgctttcaggctgcgcccgtcgcgtgcccgccttcgtcggccgccagcccgagttaacgttctcgagacaagatgggaatggcagggcggcagacggagcaagcagagagatgggaacggcgctggtcttcatatattgcggtcatctcggatcgtaagggggaggcaggggtctagcgcctagtcgctctcggtatcgctgtcgtcatcaaagtcgctggcgaaggtcgacgagtgtcgcgtcaattttcagtgatgactgatagggaggtcaggacgtactgtctcgtgttgatcgccttggcggtcgtcgccgtcgttctccttgacgtctgggcagcgcgcttaggtgacggacccgtcaccgatgcccgggctggttgatgcagtcgcgagacggacaagaggcggtcagtcgatgccggagctagcggatggggtagagcaaggagagactgacatttcttgctggcagccggcttcgagggctccggcgcatcctcgccagagggctcgctgtcatagagtcgcagacgctttgcgttcgtctttgagagtgtcttggcgaacgactcgggctcttccgcagcgaatcttgcgggggacgctgcaaagaacatgagaaggtgtcagcactgcgcgagcacaccggaatgcgagcatagaacgagaaccaacagccaggctgaagctccgacggtgccggcttgctcttccacctggtcgggctcccgagtgtcgcctcctcgtccgagtttgactcggtgtcgcttccgacaaggaatgcccggctcttgcgcttgacgctcacaggcgtaacggcagccgtttttccggggtcggtgatgctgccgtcttcgtcgggcgacaagttagccgtgctcgctttgggcgggagctcagcgtcgtctccgtcctcgtccgagtcagtgtcaaaaggtttatcgctggtaggccgtgctctgtgacgaaacctccaaggtcagcgcgcttgcaaggctcggcgtgccgttcaagtagaggcgcactgactctttgacgttcgggttggccatcgacatgccctttggcttgccgacgttgtgatcaacttcaaagtaattgccaggtcagagaaccgtccttgcaagggtcgggctggaagcgaacgcactgaagggctgcgacttgactggactctggctggcagcctctgccctcgccgtccggtccctcaactgttgattctgccgctcgagcatctggatccgctgctcctctacacttggccgtcgtgcttgcgacttcgaggggacagagagctgcgaggaaaaggccactggcgataggacgaccttgcgggctggcggaggagaaggggattggcgacggacgaccagggtccgctggcgggcgagtagcttcactgcctgtaaacgacattgttaatgctagagtcagtcggcaggccacatgtgagccgtagccagcggacacgtacgtcggaagcgaaggcagtcatcccgcttaaccagtcgctctccggcatcgcatgcagcttaacgacgaacggccggagggtgggcgcgtgagtgggattctggatcttgagctgaagcgcccaagagaaagattcaggtctcagctcggcagcgaagggtagcaagccagaccgcaggcgccgactttgatggaggccgagctcttggtcgggacgtcgaggaaggcccctccgcccgcaagctcgctgccgactcgcttggcactgatggagtgaaacgagagcgggtgaaacaatagcacatcagctgcaatgattaggcagcgatggtcacaggctggtctgtcgacgtacaagacggcggcctcagcttctggcatgaggtcgcgctgcgcgcacgagccgcgtcggatggccggcagaggtcgcatcagcccttagaccctttgcgacagtagcaaggagcaaacggacgtaccaggccgtccatgtcgtcttccgaccagcctccagaccatgctcgcgagagcgtgccacccttgagctcgaaaaggctaaggagccacgagctcggcccgcagccggtcgagctcgcggccgagtggaggaggaaggctcgcgcctcgcggccgccgccgtcttgatggtggacctcgagcagaaggttgaggtcgtcgaagcagcccatcctggcaagcgactcgtagaaaggagttcgaggtaggcaagcgggcgagataagagggtcaccgttcgcgggagagtcgatgacggcacgagagttgaacggatcacgccgaaccgcccaacaagcaccccgaccctcttcagcccaagcctctcttcctgccgacgctgcatccagccacgatgccgcaggccgagccgctgctcctgaccgaggaggccagggcgaagcggaccagggagctctttgacgagaccttcgtcgacgaggagtaagtcgcgccgccctcccgcaccttcttcatcatctgccagagcctgcctggcctccgactttcaggataggcgctgacgagggtctctgaccgcctcttactctgctcgcgcacttcgccaggcatatggcgaccttccgactggccctctctgcgccggacctgtcgtcgacctcgccgacgtcgtcgccgacgacgccctcatcggcgctccccactaacgaggctgacgccgggcgagccctgctggatgccgctgcaaacggtcacggcgaagtcgtcacttacggcgacgacaacaccgggggcggaacggagctgcaaggcggcgtcgagaagctccgggccgtcagcgactttgcgcctatcaacacgcgggtcaagcggtgcgtcgcggccatcatcccgccgaggtcagaagctgctgtcgaggacgctcactgaactagcgtccttttggccacgctctccaacagccgacacaagtcgaaggtctcgcgctcgtctggctggtgcgtcccaactcgcagagcgtgttccagcgagcccgccggagcccttcgcaaccaactccggccgacgactcacctgcctgcgcctctccctctcgcttgctgcaggtcctaccacatttttcgctatccgatcctcttctttctcctcttcatcatctacgccgagttctcgtgctacgtcatgacgcgccaggtcgtcaacgtgttcgagtacgtcgtcgcctggaccggccacaagcgcgtgctgcgccggcagatgcgtcgcgcaggggcctggcgcgaatgggtcatcgccgccaaggagatggacgagtacctcggatttgaggcctggaaggcggtcagtaatcgccgatagctgcgctgttgcagcagggttggcaagctaagttggacggctgctgacacgagcttcgcgtctcgcaggaggacgaagactcgcagtacgattggtcgctgtgcgtgccctgtcaactcactgggccacagaacggcgctgaccgctctaattgactgactgctcagcatccgcaaggtccgcacctcgctccgcacgctgcgcgccaagaacgacgtccgtggcctcgtcggcgtgctcgaggtctgcctccggcccaactttggcggcattgagcgcgtcaggctatacagcgagacgttctacggcaccaaggcgctcatcgagggtgcgtgtcctgcaatcggcgccgcgtatcgactgtcgccggctgatagtcctccttcttcagactacgtcaaagaggtcgctgcagccctcaaggcggtccgcgagagcacggagctatctctggaggacaagcggagattctacaagtcgtgcaacaaggtccgtatgggcaaggctgatcgatgacggcttcgcagacgctgacaggccggcccgccttctccgcagaatttcggaagcaccgcgctttgcctatctggaggtgccagcttcggctactaccattttggcgttgtcaagggtgcgtccgctaacagtcgattagcggcgatcatttcgactgagactgacgatcccgttgtgccacagccttcctcgaggcaaacctgcttccgcgggtcatcaccggaacctcggcaggagcgctcgtggccgcgtgcgctctcttcctcctctcatcggctgcgtccgtcactccgtgctgacgaatcgcttgagcatgcagctttgtctctaccaggacagacgaggagctcaagctgctgctgatcccagagctggcggacaagctgaccgcctgcgaagagtcgtacgtcagagtcctgcacttggtctgagctctttcaccggccgcgctaacaccaacttcgaaacccttccgcagcatgggcgtctggctgaaacgcttttggaagactggcgcccgcttcgacactgtgcagtgggctgagaaggtcagtctatcacttttctaaaatcatgctgccactggtaaagagctgactacttcgcacttgtcacaggccaacttctggacgcacggtagcttgacgttcagagaggcgtacgagcgcactggtcgcgtcctcaacgtcagcgtcatcccgcacgaccggcactcgccgactaagcttctcaacgtgcgtcggactccttggctttgctcgtctgcctgatttggcgctgatcaaccgatggaaggtcgacgcagtacctcaccgcgcccaattgcgtcatctggtcggccatcatcgcttcagctgccgtccctggcatcctgaacccggtcgtgctcatgaccaagacgccgaagggagacattgtcccctggaactggggcaccaggtctgtctgcgaagtgtcttgacgcctttgactgccagctgaccctccccttgctctgcgtccaggttcaaggacggctcgctccgggttgacatccctttgcagagtctgcatctgctcttcaacgtcaaccactcgatcgtctcgcaggtcagtgcacaacttcaagcacccgaccagcgtgggagctgaccatgctcttcttcgcctaccaggtcaacccgcacgtccatctctttttctttgcgccgaaggggacggctggccggccggtcgcccaccgcaagggcaagggctggcgcgggggctttgtcctgtcggcgatggagcagtacctcaagctggagctcaccaagaacttcaaggtcatccgcgacttgtgcgtcgacccgcggctgttgtcatgctacaggacgcagactgacgaatgaaccgtcacagggagctcatgccaaccatgctcggccaggactggtcgtcggtctttcttcagcgctttgacggctccatcaccatcacgccgcgctcgcgctttctcgactggttccacctcttgaccgaccctgatcgtaaggagctcggtcgcatgatgcgggtcggccaggccgccacatggccaaaggtgcgctcggcatcctgggcgcgaaaccgaaaggcagtcgctgactccgctactatctgcgcttggtcagctccacatgattgccaaccgcgacatcatcgagtcggagatcctgcgcggccggcagaaggtccggtcgcaaatcggccgcgctcgacggctgaccaacccagaggcctcgcactcgccgacgcctcctcgcaccgcggctgcctcgccctcggggcaggtagacaccgacgatggaggaccgccgccatcgcttacgcaccggccgagcatcccgattgacagcgacgcagagacaaagtacaacgacgagtggcagcggcttcgtgcccagggcggcgccacgtcggccatgcgacgcaaggcggcgccctcgtccagcagcaacggccaccggcgggtgtcccgggtagacgctgccgtcggtctcggcagcggtggatctggctccaactcgcctgcatccggtccaaacggatctcgtcggcgtggcaagggccgggcgacgtacctcgaccagcatccggacgacgacgagacgactgaccaacgctcgtcagatgccgaagcggccgacgcagtctcgcccttctcgacactgcagacgtcgctcggctcgtcgttcaggcgcatccggacgcagtctttcccggccattcacttgccctggccagccgcccgctctcgagggacctcgccaacaaagccgtcgaacggcggccgaagcccggctcacccgtctcgagccgggagcggcgtccggccctcccgatcaaagaagaatagcgctgcaacctcgcctcgagcgacagacgaggacgacgacgccttttcgcgcttcacttcgagcggcgacgaggacgacgaggacgagctccgcgtgctcgcaggcgacgacgaggacgacgatcgggcgctcgacgatggtcaggccgcggcgatccacagtctgcggtcggcgacttgatgaaggacgcgagcggcctgccttagacgcgcccggcatgcgggatcatgtacgacgaggtcgcaacctatactcattatgttttacatgtgctccgcattgacagtgccttgctcagtcgtcgaccgatgctacttgactggaaagggtcatcgacattggaaacggagcgtagtcgtggaaggtggggatggggatcaagggacaagcagtagggtgtcagagaagatgtaagcctgattaagaggagaaggcggcaaagtcagtacaggtcggcgaggagggaagggggcgagcggcggcgggagagcatgggcgaggtaatggagcagtgtcagaaaccctttgtgggtcggatcaagtaaattccttggagatttcctaggtctccgtcgtagtgagctgagttgatacgttcatcatgttggcgtagttggcgggaggaagggatggaggggaaggggtgggagcggccgagaggaggaacgagcactcacgttcgtattaggagagggcggagatcgctccaagcgagggaccacgtcgtgcaggtgcacgagacgtgcttcctcttgctgcgagtgctgctgtcggcgtcgacaggtcgtctgctttgaggagcgggcctccggcaaaaacgggcggtgtggctgagcgcgacgctcggcgaccgccggcgccggcaccgcttcgtcgaaatcggagagagggccgcagcaggcccacacaggtcgacccagacgagccttatacccttattcaacaactcagcccgaaagatgcccggcgccgtcaactctcgtcaggcccagaagctccggaaggccaaggcgctcgaaaagcagcgcgccaacgccccgccctcgccgccgtccgtcttcgacaagccccggaccaagaagcgcaagcttgcgcaggctgccgccgccgctcgccctccgccgggctcggacgatgaggagatggccgccggcgagggcgagagcgccggctcggctgccgaggacgactgggaggagcggccgaagaaggcggccaagaagtcgaagaaggctgccgcccgcgagctcgcacccatcctgccggagattccggcgatgctcacgccggccgacattgccgctgccctgcgtgccgagaagcgttccgcgagcccagaggcggcgccagcaaagcctgtcaaatcggcaaagcgtccagcgggagcggcgaagaagagcaagaagaaggctgcgtcgacgccggccgacgccgctccggtcgtcgctgcgcctcccccggcacctgcggccactcctgcggtcgtcccggccgctccgacgcccacaccttcgcctcctcctgcgcctttgccttcccctccagtgactgctgttgcgccacccgctgctccggtcgcttctacctctacctcttcggccgccgccaaatacctcgccaagcatacgatcaccctctccgagccgtacgctccccttacgacgttcgacgccctgccgatctcgcccaagcttacgagcgccttcaagacgttcaaagcaccgacgccgatccaggcctgcgcttggccggctctgcttgacggcaaagacgtcgtcggcatcgcagagactggcagtggcaagacgctcggctttggagtgagttgcttagccttggacagctgttgtctatgcttacgctgacatgcctgtgaatagattcctgcgctcgagcacctccttcacctgtcgactcctccctactcgtccaaggcgtgcgcacctccgatcgtgatcgtctcgccgacgcgcgagctcgcgatgcagacgtccgagaccctcgtcgccctctgcaagccgctcaaggcgcggtgcgtttgcctgtacggcggcgcgtcgaaggatgaccagttcgcgctcctcaagggcggcgatgtgcgcatcattgtcgcaacgcccggccgtctcatcgacatgatcaacgacaaggccgtctcgctcgacaagttagtgtctgctttgctataccgcctgcaccttccttgctgacatgcgattttttccaagggtgtcttacctcgtgctcgacgaggccgaccggatgctcgataccggctttgaagccgaggtcaagcagatcttcgcacgcgtgcccaagaccggccgccagaccatcatgtgtacgtctcgacagacctgactgagcgacgtcgcctggctctgactctcgcgtttgccctccgatgcagtctctgccacatggcccgactcggtccgggcgctcgctgacacctacatgcgctcgcccgtgcggataaccgtcggctcagacaagctgacggccaacgtctgcgtcgagcagagtgcgtgcctctgcattcaactgcccgccacatgccttttctgaccccgcgcttctatcctcgtcttttgcagaggtcgaggtgctcgactcggacgctgccaaggaacctcgcctactggccgtccttcaggcccacaaggcggcgtacgctcggtcagggccaagctcgcccctccggatcgtcgtcttcgcgctctacaagaaggaagcggtccggcttgagcttctgctgcgcaaggccggctataaggtcgcgggcttgcacggcgacatgctccaggccgagcgggtcgcgagcctcgacgcgttcaagaaggccaaggtcaacgttcttgtcgcgacaggtgtgtgcgagtcgtctcgcgtcgcatggtgaaaatcatgactgatcgctctcgatcggcttttcgcagatgtcgccgcccgtggcttggacgtgcctgacgtctcactcgtcgtcaacgttacatttcctcttaatgttggcgagtaaggatcaatcactcactcgcacaaagctcgtttctgacctccccattttgctgccctccagaggattacgtccaccggatcggccgtgccggtcgtggcggcaagaagggcaaggcgatcaccttctttgtgagtctggcgcccctgctcaccgggtgagccgagcattgatcaaacctccaccgtcgcagactggcatgaagcacgagaagacgctcgccggacccttccagaaggtcctgcttgaggcaggggccgacatccccaaggagatgagccgcttccccaagaatatcgtctcgcaacgcgaggtgggcctgccggcctttcctgcgacccccgccctactcgacagtgctgactcgactgcacgtccaaaaaccagagcaagcggcgattctttgcggagaaggatgccaggcgggcggctggggaggatgtcgactgatgcatgtatcttcaggaagcggccgcgtctgccagcgagacaaaacgtgatctgcgcgtgctgccgcgcgcgaccgatccaggtggaccgcatttgctaagatgcaagcgagtcataccggtacggcaaggcgaaccgccggattcgggctggcgggctttgcgcttggagcggtcgtccgcgcggcgactgacgccgcgttgccgtcagacagcagagcagataaggcacagctcaggttgctgtgtggtccacctgcacagccgagcgaccgggcatgccggtcaaacacgaggactcggcttgcgatgcgtcttgagattatcgtagtgggtcgttgacgacaacgagggtgttaggccgggtgcagactgtcaaggtcagagaagttgcacgcacccgatgcaaagcggcgacccaggaaagcgggtctgcgcagtaccactgactataggacgactgaaaagttgttgcgtccacccgaggcgtcgagtaggaccttctttctgtagggcgtcgttgggccctccggtgcgattcgccggtagagccagtaggcgacgcccttgcccttcttgttgagccgctcgcggacctgctcgaaacctatcgagcgcatgagcccgcgccagtggtcctcggacgtatagcgcgagttgccgatgcagggtgtcgggaggaccatgaagaggtgggttggtctggcagcgtcctctgcagggtgaaggaacgacttgatgtgctcgagcatgcggcctgcagtaagtaagagtcgagcaaggttagctctagcacaagtcttcagcgcgagtcggcagactgacctcgaccctcgggcgacggcacaaagttgaggacgagcgagcacgagacgacgtcgtagagcgcctctcccgactgcgcaggactcggccggtccatgaagtcctgctcctcaatctgcggatgacgcgagtgcaggtcgagcggcgtgttgacaatccagggatgcccggcgtagttgttcggcacgagcgctccaatctcaaggactctgtgagtagccggaggcaagccgcaaggtgagcatgtgcccagagttgctcccgtacatcgccgaaaccccaacctcggacatacctgagcgggctcgtggccgagcgaccagcgttcagcttgagctccttaagccaatcgaccaggacgtggcttgagtcgccaccacggtccttgctctggccgagctcggatgctggaggagcaagtgagggagatcagcccagtgacaggcaggcgaggaggcaggcgctcagcccaccacacctcgcacctcaagcaacgcctcgataagcaggaacgcacctcgctggtaccactcgagaccgccgaggtcgaccatctcctgctcgaccgccgtcagctcactccggagcgccgtgatcgtgccgtcgccgccgtcgccggtgctgagcttttgcttgatctgagcctgccgcttcaggaggacgtggaacctccggactaaggagcacgggaacgagaagtcagaacagacccgcggcatgtgcagagctcagggtcgagctcaagcaacctactgagggttcgcgtcgcgagactcgaggtcccagcggccgacttggtcgatggcagcgagctgggccgagccgagggcgccgccgtgatgggctgtttcttcttgcggaccgtcttcgccatagcgaagcgacttgagctgagcttgtgagactgctgagaggaggtgagtggagcagagtggtaggcaggagttgacgaggctgcggcgtgcttggtctgcgcagcgctttcccggcgggcgttgcattcgttcgcacctcgagctcacttcggcaaaaaatagagagggctcgaatagctaatcgtagcagagcgagcggcggagatctgcctctagcgagtaggcatagtagacccaagcgcgcagagcgaggcgtcaagggcgaatactgcgcgaggctagcacagcaggcgtgcgtcctataggctgcaggtcaacatgagatcggagcgagcgtgacagggtcgtaaagggaagggcgaagacgaagtcgaaagggaccggcacacggcctggccaagagaagaggtgaagcttaaagcccgcgaggcgctcagaaggtcgtcgtccgcacccgcgttgggtcctcctctgcgagagcaatgtcgcggaaggctcgacggactgcatgacggtgagacagagtcgtcaggaggcttgaactatcacgaggacgtgggccggggcgacgtacctcgccggagaaactcgtaaaagtcgcggtctttgtttagccgggcgaggatgtcgcccagagccggtatcgacggcgacacgccagggactgcagagtaggtgcggtcagtaggcgagcacagcaagagggcaacggatttaaagagactgaccagcgtaggaggcggcggagaggtcgagcaggatcgaggacgttttgtccggatccgacgggtagaggtcggtgaagcggatcaagagcgtatcggctagagcgcggggcagtgttcaaggtcagtagtggcccgctgtctggtcgtagggcgcaagggcccgcgtactcttgacgccctcaatcttgatgcacaggtgtagctcggcctcggtcaggtcggcggcgacggccttgcgcgtctgggcgagcgaagcctctctcgacgtcttctctgcagattccggcgtgcgggtagagcgatgcgagccagtcagcattggccccgtccctgacaggtgtacgacgcgactgacctcggaggagcgtctgcagctgagcctcgcgctcctgggcatcgccctcgccgagccggatctgggtctcgaccccaccgagcgtgagcttgagctcggccagcgcctgctcgagatcggcgacctcggccttctccttctcgagcaccttgagtagccggccctccttgtcgccctcgctgtcgatctccttctcgagccggacgcgctcctcagccgccttcttcatcgtcgtcgtgtgcgaaatacgccgggcctggatctcatccttgccccggaggacgtaggcgtcgagcgaggcgagaaaggctgcacacgactcctggaacgggccgaaggcgaggtcgtaggcctgcgtgtcgcggaccgagggcatcggaggaacgaacgggtgctgggccgacgagcctgacgacgggtggcccgaccgcgaggccgagagcatgtgcgacatggagagaactctgctggatagagatggcggcctgcgactggatgggtgggagctgctgagtgacgtggtcgtggtcgggagacaagcaaggccaggccggttgagtgactttggctttggcgcagtgcagcgacgcgtccacagcctgtgacgctcgagccctcgtcgtccacccttctcctagcctcatcttctttccctttacgaaagacaacctagcgcccgtcatgatgtcgcgcgtgctcaagtcggtctcttcctgtcttgggcggatgtcgtcaacctcgatcgtggctgactcgtcgcactcctcccgttgctctcccgccgcccggcgtcgctcgcgcaccagatcaacacagaacctggccgactcgttcagggactcgctcccgtcgtcgccctctaaggacagctcgcgccagaacggctttggaacgccgccggcctcgccgacaaagtgcagcagtcgaggtacgtcgttctagttctcgggccatcggagagagcaagaggagcagctgggcgccgggcttgactcgcgtcaccgctggagcgggcaaatagggcttgctagcccttgctgtcagctggagggttgatagatcagaagcatgagatggacagtcgagtcaagattgtgctgacgttctcgctgctcctcgatctacccgcttgcctgcctgcagacgccaatctgccctacgcccagtcgtggtcgtcacacgccgctgccgccccgccgccgaccccatcgctcgcccgcacctcgcaagcgtcgagctcgaccgttgctgatgtcgcgatgccgacctatcggccgcacggctcggcgatcccagacgtccgcatgcagaccgtcgggcgcggcgccggcggtgcggccgagctcgaggatgtccggatgatgacgacgcggaacgacggcggccagccgggcctcaagccatgggagctcgatttgatcgagagtcccgacgtccagcggaaggcgacggtcgctcagctctacttccttgactactactgtatgtacacctcaccgtcgaggggtgtcacagccaacgctgacgagctactgcgccccactgctgttgttgctcagtcgacatgctcggctacctgcactcgcgctcgctccggcaagagtcgttcaaagcatcaacagccgagcgatcaatcgagcccgagtcggccgagtacaagaaggagctccggtcgtacctcggccgcgagcgcgtcctgctccgcaagcgccggacaaagctcaaggtcgaccagttccggatcattgcgcaggtcggccagggcggctatgggtcggtctatctcgcccgcaaggccgacacgggcgaggtctgcgcgctcaagaagatgaagaagaagacgctggccaagatggacgaggtgcgtgaagcaccgtttgctgggcatatgatccgtctgactaccgctgacccagctttccgacttttggctccagatcaagcacgttctcgtcgagcgcgacatcctgacggcgacaaagacgccgtggctcgtcaagctgttgtacgccttccaggacccggagtacatctacctcgctatggtcagtcgctgtgcccggccatgcctcccagcgacgaatttttgtctgacctcctcattctttcgcaggagtacgtccccggcggtgacttccggacgttgctcaacaactcgggcgtcctgaaggaggagcacgcaaagttctacatcggcgagatgtttgcctcgatcgacgagctgcacaagctcggctacatccgtcagtctagtctctacaatcagtccaccttcgaagctgactcgctgctcgctctcgccagaccgggatctgaaaccggaaaatttccttgtcgacggctcgggccacgtcaagctgaccgattttggcctcgcaaccggcgcgctcaacccgaccaagattgagagcatgaagaacaaggtgcgtcttccgtctgcttgggttgtgcgacgtgatgctgactgctcgtcaattgcttgcgattgcccctctagcttgacaaggcaaaggacgacaacctcgtcttccgcaacacgctcgagcgccggacgatgtaccgcagcgtgcggatgaaggagccgcggtatgccgactcggtcgtcggatcgcccgactagtgcgtgcctctccaccgagcgaactttttctagctcataatctgattgatggtcacccgaccttcagcatgccgccggaggtcctccgcggcaagcagtacagctattcggtcgactactggtcgctcggctgcatcctctttgagttcctgtgagctgcgcctgctcgtctcgcgctgtcgtctttggttggctctgctgacgtcgccatcctctctgaagcgccggcttcccgccattctcgggcgcgacgtcggatgagacgtggacgaacctcaagaactggcagaaggtcctgacccggccggtctacactaacccgaaggacctcatcttcaacatgagcgacgaggcctgggatgtcatcacccggtgcgtcgcccggctgctctcataccgcgcgtcaacgcagcagctaaagagtccctctgcccacagcctgattgcccacgacaaggtccggatggcgacgatccccgagctcgagacgctgcccttcttctacggcatgcgcttcaaggccctgcgcgagacgcaggcgcccttcgtgccctcgcttgaggacgagatggacgtcggctactacgacgacttttcgaacgcggccgacctcgccaagtatggtgcgtgtcgcggtcgtcgccgtgtctctgccgtgccctggtcatggtcgctgactctcctcacaaccgctgcccttgcaggcgaggtctttgagaagcagcgcaacgtcgacgccgtccaggagaaggacgagggcttcaaccgcggtgtctggcttggcttcacgttcggcaagaacaagaatgagacgcaggcgctcgccggccggctcaagggccagggcgaggcactcgagaccattttctagcgcccggacgttggagcgacgacgcctctcgcgccggccgtaatgcctcggactctcgtcgacctataccttcccccttttcttgcttttctcttcacttctctacccgttgctcttcgcttcctgtaccgctctcactctctcgttgatgcactttcttgcccgcgcgctctcggccggactcttccgatgcatgccgccggcctcgtgtctttgccgcctgatggcttctgactagcggcgtctcaacgtgcggccaaagttgccgacgcgtgggcaccgaggctgcgaaacctgctcgggccccgaatgggttacgtctgggcaaggcgcgcgcgcgtttcggccgccagccggaatcgggcggctagagaaaggggtcggcgggcggccgtcttgaagccgccccctggctctcttactcgttttcattccaaccaccatccccacctctccatcccctaccccgacctcctacgaaccgctagacaacagaacccccggcccatgtcccgcttctcgtcgcgcctccgatccgggcgagcactcccgctcgccgccgccctcgccgcctcgggctcaggcctggcctactacacgctctcgcccaaccgcgtcgcccatgccgacggcgctcccaagattgatctcggtctccgggcgactccgacatcggacctcgtccggagctgggttgtctacaagatctggtatgtcctggcagtgccgtcgtccttcgtctgtggtgtgcctcttggcggcttcatgcctcaggtgggctgaccatgtcctcccgtgaccctgctcttccttgcagccagttccccatgatcgttgataactcgcccgtcctgctcgagacgttcggcaacatccccgttctcaagcagatcacccagtgcgtccgtctgcctctacgtcggctggcgatgccggcggctgcagctccaacttgccgctgaccgcccgcgcgcccaggtttgtcgtccgccacaccttctttggccagttcgtcggtggcgacactgcgtccgactgcatgcccgtcattcaggagctcaggcggcgcgagatgggcacaatcctcaactactcggtcgaggtctcgcacgaggagtcggagtcggcgggaggtgctgccgccgccgtcgttggcgctgacggcatgactgccaaccggcgggcggccgaggcccgcgtcctcgagacgattgacgccatcgaggtctctggtgtcgagaacaagaaggtcgtccaggcctcgggcggcaaggaggtcggaagcacctggctcgccctcaagctggtgcgtcaagagagcggaccctgccgagggaaatacgcgccgcccacgcgggacgcagccagctgaccaccggcccttcctgccttcctctagacgggtctcatggccgagcccggagcgctccagcgtgcggcatcgaccgtcctcgcgatgcgccaggccaagccggacgagtcgacctcgacatattatcccggagtgcgtctctcgcgggttgaagggctgctgcgcgcgcgcgtcttgctgacctggccttcgctccttgccagaccccttccgactacgagctcgcccttatctcgcgtgcgacgacgccggcccagatcacgctgcccaacatccccgacggcgtccggcccgaggacttccaggagctcgagaccctctaccaggacatgcgccgcatcctccgttcggccgcctccaacggcgttcgcatcctgatcgactctgagcactcttggttccaggtgcgtctccggtctcgctttttgacgtctgcgttgcacgcgtgctgacctcttgcactcgttccgctccgatccagcccgccatcgactcgttcactgccatcctctcgcaggagttcaaccagctgccgaagggcaagtcgaccgtcgaaaagctcgacaccgactacccggcgacccagccgcttgtctacggcacctaccagtcgtacctccggcgcaacatcccccacatgaggcacgcgctcgcgcacgccaaagccaacaactatgcgatcggcttcaagctcgtccggggcgcctaccacggccaagagacgtcgcgctggcacgcactcggccttcccggacccgagcccgtctggtcgaccaagcccgacaccgaccactgcttcaacgactcggtcgagatgctcatggacctcatcgccgccgacgtctacaccaagggccagggcggtgcgccgacggtcgccgccctctttggcacgcacaacgccgagagcgcgagccgcgttattgccggcctcaagaagcgcgggctcgcgaccgagattggcatggacgacccggtcaacggcggcaagctcatcgtcgacgacgaggctcgcaagcgggtcgccatcggccagctgttcggcatgtgcgacgacctgacgtcgtcgatcaccgcggccttcgttcccaacaccggctcgccgatggccttcaagtacatgccgtttggcgcgctcgaggaggtcatgccctacctcggccggcgggccgtagagaacaagtcggtcctcgccgacggcggcgccgttgccgagtcgaatcgggccgcgcgcgagctcaagcgtcgctggttcggcattaactacgactagacgacccccaacaaacactacgctcaaaacagaaacaggatgaagaacgagagacgacggagacggagaggatcttcggagcccgcggcgggcgccctccatcagagggcgcgcgcgggtacgacttgctgctttgcttttttttcgtgtcctagaccctgcacttcccttctactttaacgacttacgatgatgtactgcacgcccttgacttcttgcttgaacccgggaaagccgtcttgtccctgtgcgacttgagcaagccgcccttttataattctcggccggcggccccgggagggcgatcttgctgcgcctcgcgccgggctgagagacgcctgtcgttggcccgggccgtcgactcttacctcccggcacttctgttctcctcttctcatcgagatcagcaagcagacagccatcagacagaaaagctacaacctcatggcacctaagtgcgttgccttcgtagccgccggcagtctcggcccaagactgcgagcatcgcccggctgaccgcctcccactcgccccacttctctccttcccctttcgcagcgacgactcgaagccgcgcagggcgcctccgagcacaacagcggcagcgcaggctgcccgcgcgaaacgcaagcgggctgcggccgccgaggagggtggcgcgagcagcggcgacgagcgcgcacgcggcggcaaggcggccaaggtcgcgagcgcagggacggcggccggcgctgcttcgtcgaggacggcgctcgctgctactgcgtcggccgcgagcgggtcaaagcagccggtcgttccgacgccagaggaggagcggatcaccaaggtgcggcatcgtccggccggtttgacggagcgtcctaggctttgagcccgcggctgacctccttgctgcacgcgccgcgcccctcctccgccccgcagctcgacttcaacgccttcccggcgacgtcgctccgagcctacatcctcgccaacggcctgatgccgcggctcgagccgtcgccctacgccgatgagccggcaccgctgcgtgagtgttgcgcgcgcgctgctcgtgctcgcgctgttcgcctacgacgcgcgactgacggctgaccctctgcctcttcaaccctttgaccttctcgtccgcccagccgagacgctctaccgggacacgagcgccgtaccagcacctcagccaggggaggcttatccgccgccgaagcgggtcgcgatccttgctgacgtccaggccacgcacgaggtcctctcgaagcacgcaaaggaccactggcataagacgcagggcaacggcccgcgcgagggcgaggtcgtcactggcttcctgtacgcgtgtaaggtcggaggtgcgtccttgctgcttctcatcttgcgctcgttgtggctctcggttcactcgaccctcgttgcttcgactggaccgcagaccgcgtcctcaagattgtgccgccctccaactaagcgccttctgctcttgcctgtctcctggtgagtgtgtgagcagcgaaaaccggtcgggacgatctgcgtactgaccgcgcttcgattcttgtcacagtccttcctttacgaccctctgcccttggccgcccgccttggccgcccgccttggccgtgcgtaattgttgtcgcctctgcttcaagcacgactgaatgctgacctgatctggcggctgctcagtgtattttcacctgcttgcttcctgtctacatgtcaattcgacgacagccggggacgatacctgtacctagcttttggttgccgggaagcaagtctgagctcggtttgcccgctcgtgacccacgtgctctcctgcagtcctggcgacagccgggcaggcatcgcaacttgcccctttctttccaagcccgccgacgcgactgcgtgcctgtcggcggccgttcctcgctcgacgcgtcgcccgcgcgcgccttgctttccggccagccctcctctctcctggctcctgaccgccatcctctttctctccaatccctcttcgctttcccttcccgccgcccgtcggccacggtctcgtttcgctcctcttcatcgacagccgtgagctctgctctctcgactcgagctctccctcccgccttggggttgccccgctgaccaggcctgcaccgctctcctcgccctcttccagctgcctggagcatcgccgtcctttccttccttcgacactcgctgtccgggccgacccttccctcttcttcccctctaccctctttctgctcggctggtccgacgatgaagctcgacgccatccttctcgccgccttcctcgccggcgcatcgcttgtgtcagccgcgctagaggcagacggccggctcatctctcccgacctcgacgtccggcagttccgtggtggtggtggccgcttcaggggcggcggccggcaaggtacgtctcttgcgccttccccagtcgggcgctcggccgcctgctgaccgccatctcgcgcgtgctcgccaggcggcggacgtggtggcttcggaggaggtcgcggccgaggtgggaaccccttgccgccagcccctatcgaacagccgactgaccggacctgctcttctctcagtcacgtccacgtctgtagctgatgctggcgccaccgctaccgcctctgtgcctcccgatgcggccgcgaccgacgtcgccattggcgacggccagaccggcggcgacggcactaatgtcggcggcgacggtcaggatggccagggcaacgccggcaacagcgcagacccgcagcagtcgctcagtcagtccgaccttaccttttggcttttggttgggacaagatgctgacctgggctcgactcttgttcgcgacccagctctcctcgccgacctcgttcagcccggcctggcgcaggacggcggtgccgctgccggccaagtgccgagcctgacgtcgaccaacaacttcatgtgcggcctgcccatcttgagcatccgctcgacgacgtgctgaccagcggcctctgattcacccgcagcaacttttgcgacacagtccaactcccgctgaccgacggccagcagatcgtcggtggctcatgcaacccgaccccgatgtccgtttcctcttgctttacgagcgcgatggcttctgacgaatcgtcgctgtctttggctgcgtcgcacaggggcgtcatcgttgcccaggcgcgcatgccgtcgtgcaaatttaccttcccggcgaacggagcgaccatcgccgccgacgagactttcacgctaacgatggcgatccgcaaccgtacgccctcggcttcccctcgtgcggcgtctcgatctgacctgactcgtccgcaatcatcccactttcgaccagtcgccaccggcaactttgtcaacccccagactaactactttggcgccccggcgcagaccgacggccagggaacacttatcggtcactcgcacgccgtcatagaacagattgcctcactcgatgcaacgacgccaaacgacccgcgcgactttgccttcttcaagggattgaatgatgcagcgcgtgagttacccgagcaagcgcaggcggtcaacgttgtccaactgacggcctgttgctctcgcccattgactgcagagaacggcgagcttagcgctgaaggtgcgttctcggcactcgcacgcctcgtcgagttttatgcttacccgcttctgtcctgcagtgaccggcggcctcgccgcggggacgtacaagatgtgctcgatcaactcggccgccgtacgtcctgcagcgcacgatcgctcgaaagagtcgtcctgaccgaagttaccgcctcctgacgtcgcagaaccaccagccggcgctcgttgccgtcgcccagcacgcctcgcttgatggtacgctgtctgcgccagacctttggaagaagcacgtgctgatggctctggtatcgccccggcgcagactgcgtctacttcaccgccacggctggaggggccgccgccgccgccggtgaggctgctgctgctgctgctggcggcggcgctggcggtcagcaacagcaaggaggccagcggagccgcctccaccgtcggcgccggctgcccgtcaagcgcgcgaaccgtcacgtctgaggtaccggtcgccctttgcactgccactcttgccgacgttccgacggtcgtcgcgcagcggccgtcgccctcctttctctcctttcctcctctcccacccttactgcacccacctcaacatgcgacaccctcctctcgctaccacccgctggctcgggcgcgactccctctgaatccatgcggctccgctccgctttctcaaccgcgcgcgcccgcgtcggctgccgagttccggggccgaatgacgcacgcgtcacttgggctttgacgcctggcttgggaaagacccccgcttcatcgctctcgtctgcggcttcgagcttccctcgccttgccctaacctcatcatcctcccgttctcccttattcggcgcatacaccccagctcagcttcacgtcgtcctttcgtcccggttcttctccgtcttctcgcccgcactcgcaaccgcttccagatgacgcaccagccgccgaacgcccccatcctctactcgttcccggacaacggcgagctcgtcgacagcgtcgcagagttcgttctcaaggcccagaacgacgccatcaagaagcgcggcgcctttacgctcgctatctcgggcggctcgctcccggccaacctcaagggcctgatcgggaaggagggcgtcctctttgacaagtggtgcgtttccctgtcgtccaaccctccgctgggtctcaccttggcgccacggcgagaggcatctgggcagctcgtccagccagatccctcgcactagtcgtgataggaccaggcgggtctgcaaggaaggcggtctgccggccgggtctttgcgcaccggccgcagctgagctcacgagctgactatctgcccgtttgtccttgcccttctccttccctcgtcacgccgtcgatccctgtccttcaccccgacgcccatcccttcttcgcttcaccttgttgcccgcctcatagggagatcttcttctgcgacgagcggctcgtcgagctcgaccacgaggactcgaactatgcctcggtcaagaagctgttcctcgaccaggccaacattgccccttcgcaggtccacacgatcgacacgtcgctcatgtcggacccggaggagctcgccgacgagtacgaacggcagctgattgcgacctttgcccagcgcgacgcggcgcggtacccggtctttgacctgatcctgctcggcatggggcccgacggccacacgtgctcgctattccccggtcactcgctcctgtcggaagaggaccgctgggtggccttcatcgaggactcgcccaagccgccggccaagcggattaccttcacctacccggtcattaaccacgcctaccgtgtcgcgtttgtcgccgccggcgagggcaagcaggacgtcctggccaaggtgctcgacgagcccgagctcggcctgccctcgagccgcgtcaagcccgctcacccgggccagctgtactggttcgccgacgacgccgcaaccgcaaaggtcaagtactccaaggtgcgccgattccttcttgtctctttcggctcctcggcacatagcgctgacgtcgcctcaccctcgcagacgcccttccccaagaagctgcaggagagcgaggagaagcttctcgcggcccaggactgagcgcacacgctatctcgatcactcttgcatcatgcgacgggccgctcgtgacgccaggtctcgaggcggccgaggtgggctctctccgtgcgtcggctgagaggcagcgacgaggaggaaggccggcgccaaggcggacgccggcgggctctcgggtgggccgagtgcggttggcgggtagagtctacgactttccactgtagcgatctgattccccttctcttgcttatccgtctcggctcgctttggcaaaggtcagtcggaaggtcgtatagagcggtcacatataagagagtcagaaggcgtcagagcaaacgaggagagtgtgagggagcgtgtgtctgttgggtctgtttgggggtccggcgagagagagggaggaaacaaagtagggagagaatggacagcggcaagccaggcgcgggccagaggagcagagagacgggtcgcgcgcacgcgctcactcgtcgtccgagtcggtgttgatattgcgcttggacgagactgaggtcgcgcggtgcgtcatctcgagcgtctcggtcgagacgaacgggtcgaccggcgccgaccggttcgagcgaggcgtgatggtcgccgggaggatgccgctcgtcggccgcgggcggcgctgctgctgcgactcttcgtcgtctgcccgcgagggcgggaagaaggtagcgtactttgagagagcagacgggtaggcgttctcgtcggcaaactgcgggcgaagagagagcaatgcgctggtcagccagctgcacgtgtcacgaaggttaagacggaggtacgcaccgtccggctcttctcgtcgtcgtcctcgtcatcctcgtcgtcgtcgtaccggttggcgccccgaccttcgcgcagcgtcgccgggtaggcatggtcaacctcctcctcgactgtctggatgatcttgacgcgaacggggcccgtccggcgctcgtacttggactcgacggcgccttggccctcggtctcgccggcgttgtcctcaataccggtcgaggctgaggcgaccttaaccatgatggaggacatggcctgtcgagcggaggagggggcgcaactgtcagtcagcgggcgaaggtgaagtgcgtcccagtattcgacgcaccatctcgatctcaagcttgacctgtttgatagcaagcaaatcaagagcgtcagcagggcgcctcggccgggacgagggcaggacccacgatgtaagcgaccgggtgaaactgcagcaaaggcggcgtcagcgtgcgggctcggtcgagcgacgaaaatgactggaacggacctgcatgtagacgaacgagtttggcagactcatcaggccgacgatgaggacgtccatgctaagcgaaacggcgatgatctgcgtggagagggcggcggaaggtcagcgggaggaggcgggctctgtaagcggtacatgggagctcacccggatgttgaacttcagaagcgagtcgtactggcagcaggtgaagcgtcagccttcaagcctgaagaactttaaaaggcaggagcggggcggcgcaccttggtcaagccgaggtcaatcaaccgggtcgagaccatccggacaaagagaaagttgagagccgcgtcgacgagcaggtagatgaccttttcgcatctgtcccagatcgcgttaagccggatgtagcgctcggctgcaagaggtaggccgaagggagagggtcagttaagtgggagagggaggggaaaagggtcgtcgtcagcgcacgactcgatcgaaaagcgctaccgagcagacggccttacagatctgcagacgcgcggctgcgagaggtaggtcgaagggagagatcgaggtaagtgggagaggggaggggaaaaggggtcgaggcaagtaggagaagggcggggaaaaggggtcgtcgtcagcgcacggcttgattgaaaattgcgaccgagcagacagcagacggcctgacgaatccagatacagtacacgctgcaagtgggagaagggtggggaaaaggggtcgtcatcagcgaaagactcgatcgaaaagcgcaaccaagcagacattagacggcctgacctgatgttgacgagcaggatgaggcctgcgacaccccacttgagccgccagcggttgatcgggtcgctgatgaggatgcagatccggttctgcgatgcgatgcgacgtcgagaaaggtcagcggagggttgggggccgagagcagagggcggaaggagggggcctcgagccctccccccctttatgccctcctgctgagcttttggaggaattgcctcacgcagataatttgcaacagaagttgcacctggatggcccagcagctgggagacgacagtgggaggaggcgtatattaatgaatgtcttctaacttcgagtacttggagcaaacccacgtcaagattgcaaagtaaaaggcgaaagaatgcgcctgagaggggcaagggtcgagtcagcaagttcgcctcgcacaagactggtgaggtcaggcgccacgcacgatgatctcgcagaggtagaggtagcagactgtaaagggaggcaggcgggcgatcagccggaagcacgacgggacgaggagaggcgcgacgcactgatggcgaaaatcaggcagacgaggatctctgtccagcagagaacggcgtaggtcgtctgcggtgcagaggtgtagtctcggcttgtcagaggttggcttcggtgggcagagacaagaggagggacgacggacgaggcgccgactctgcttcatcgcgtgccacgccgtgaacgagcctggaagcacagcagaaagggagcgtcagagatcggcagagacctctttgcctgacgagccgcctacgccagtctgaaagaggacgcaccaaagccgagcgcccagccgagcgcgaccgcggcgacccgaaggtcgacatcggacgccacctctggcacgtatggcttctcggtcttgaaggcgtgcgctcgagggaggagcagcatctggagcatgctggaggaaaagagagtgttaagagagagaaagagaggagagagtgcaggaaggagggaggtgtgggaaggaaagaagggcagggaagggaggagagctgggtggcagtcaagaagaagtcgtcagctcttgaagcgcgaatgtctggcccaagaggtcagcgctcgagtcagtgcgcaatcaaagggaacgagtaggcaggcgacagcttgtggctgccaggcaagaggctggccgcccgagcaggcggatgaaggggatcgtcaaagggagctctcgacgcgcgggcggccggggcgccggaggccgtctcacgctcgagccccctgtcactcgtccccatccacgatagcgggcgccgctcgtgggagactgagggcgcaggcggtgctgacttgagcgacaggctgaaggtggcagccgttgagggtggccgtctgctggagacgacgaggcgaggtcgaccgacgctccctccgacggcgttcgccgagctcgatcgctctcgctcgaacttcatgcggcagcgtcgaacgagagagatggcccggaagcgagggtcgcctggaccctcttcaccaccaccaccttctcgccacagatgggctaccctcagcccgacctcccatcggcctaccggccacagcaccttcaggaccaagtccgctggttccaccttgtcccgctcctgctcgtcctcccgtacctcaagcagtcgctcgacagcgtcctctttccggccccgacgccggccttcatcctcgacggcctcgcacgctgcgccgagctccaagcgccagctgccttccgcgcccggctggtgtccgagaagcgcacccagaacgaccgcttcgtccccggcaccgaagcccggctcctgacgaacggcacgctctggaccgggctcgacttcggcaatgaggtcatccacggcgggtcggtcctcctccgcgacggcctcatccacgccgtcggccatcacgccgacgtcctctcgctcctgaccaagcgcgagcagcaccatgtcgaggaggtcaacctcaatggcgcttgggtttcacctggtgcgtcgtgtggctcgactcctctctccgaacctcatcgctctcgctcttcgtctgctgattcttgacccgtcctaccctccttccttcgatgctcaggtatcgtcgacatgcacagccatctcggcgtctcgtcctcgcccgagctcaagggcgcagacgacaccagtcagtctcgcctctgcctcgacgcgtcgcacgcgcgcgcgcccgtgtcggtcatcggctaaccctcctccatccctccctcatcctcaccgcacttccctgccctcgccagactcggtcaaggcgcccattcttccctggctgaggtccatcgacggcctcaacacgcacgacgcgtcctacaacctctcaatcgccggcggcctgacgaccgcgctcatcctccccgggtgcgtcttgcgccggaacgccagtcgcgcagtctgccgcttgagctgacaaagtcaccctctcccgacagctctgcgaataatataggtggccaggctttcattatcaagccaaggctgaccgcggagaacacaccgagctcgatgcaggtgcgtccgcaatcgcgctctctctctctgttacttgctgacgctcagcgcccctctgaccctgcaggtcgatccgccttttgtcatcgacgaaaatggcggcatcaagcggactggtcactggcgtgtgcgtcgccgagtaccgacctcggcttgcgcgttgcttgtcgtcgctgacctcgctcaccgcttcacccctccgcccattctccagtacgccaagatggcgaccggcgagaacattcacggcctttatggcgatacgcgaatggaccaggcgttcaacttccggctagcgttcacttcggcggctgagctgcgcgacaagcaggacgcttggtgcgcgagcggcaaggccaacgccgagaagtttcccgacgacctcaagtgggaagcgctcgccgacgcgcttcgaggcaaccttcgcatccaagttcatacctatgagacaaccgacgtcgatcagctgatgcgacttacgaacgagttcaagttcgagcttgccgccgtccaccacgcacacgaggcctacctcgtgcccgaggctctcaagaaggcgtgggggacgccgccggcggccgccatctttgcgaccaacgctcgctacaagcgcgaggcgagccgcggatccgagtttgcgcccaagctgctcgccgacgcgggcatctcggtcgtcatgaagtctgaccatcccgttgcgtgccgactctctcaccctgctttgcaaagaccagcctcggctgacttgatttcgcctccctcgcctgtaggtcctcgactctcgcttcctcctctatgaggctcagcaggcgcacctctatggcctacccgccgctatcgccctcagctcggtcaccacgacgccggcgcgtatcctcggcgtcgaccaccggctcggcagcctgcgcgccggcaacgacgccgacctcgtcgtctgggactcgcacccgctccagctcggcgcgaccccccgccaggtctacatcgacggagtcccgcagcttgacaagccgcaccttgcgacgcggtcgaaggctgcgctccaggccgtgcccaaggtgcccgactggggcgacgaggcgcagatccacaaggacgcccggggcgaccccgactacgcggctctgctgaagggcaagcctgccccgcgcggcgacgtcgcattccttaacgtccgcaacgtctggatgcgcggcaaaaccggcgacggcgggctcgtcgatctggccgctggcgatgagcctgggctcaagacggtcgtcgtccgcgctggcaagattgcctgcgttggccgtgcttgcgccggcgagtcgctcgtcggactccagacggtcgacttaatgggtggcgctttcgttcccggcctcatttcgttcggttcgacgctcggcatgggcgaaattgttgccgagaaagtgcgtcgcctcgcttgcggtgagatgttactctctcacctcgctgaccctctgtcgccgcacgcagtcgaccatggatggtcgcgttaagtcgaacgaagagctcgttctcgccgtcgacggcgcttccttcgccaccaaggatgccctgtgtgtcctgtctcgtgtcagctggtcatagagcgccactgacagccttctgcctctctagtatcgccgcccggtctggcgtctcgatcggcatcactgctccggtcgcgtcttcgcaggtctcgggcctctcctacgcctttaacaccggcgctccgcacccgctcgctcctcacgcagtcctccaagaggtcgtcgcgctgcatgtgacgggcggccatgccgcttccgacccgatctctgtgcagattgccaacctgcgcaagctcctccttggccaggcaccggatgctgccggctactgggccaaggccgcaaagggcgatatcccggtcgtcatcgccgtcgacaagctagacatcatgggccggctcatcaacctcaaaaaggaggtggagcacacgaacggcacgagcccgcgtttcgtcttccacggcgcgaccgaggcgcacgctgtgcgtcctcctccttcagctctttcgacaggagatgtgtctcggctgacctcttgttcaatctcggcctcttctcagatcgcacacgagctggctgccgctgacattggggtagtcatcgcagggcgcggtttcccgaccggatgggatcagcggcgcatcgaggccggcctgcctctcactcagcgcgctgccgtcgacacgctcgtccgtgccggtgtcgtgagttcagatcgaccgtcgcgctcgttgacccgccttcgctgacgtccctttacatctttcgctcgcctcgcagacggtcggtctcgggattgccgaggcctgggcggcgcgcaacacgcgcttcgagagcggctgggcgctcatcaactcggacgtgctcgacgacaaggcggcctacgcgctctcgtcgaccaacctcgaaaagctgctcgggctcaaagtctcacgcgactttgccgagcgcgactgggtcgccgtcgctggcgggctcttctcgttcgaggggaaggtcgtcgccaagggcggtgccgacggggtcgcactcttctgagcgacagggcgagattggatgcatgtttagtggaagcaagcaggcctcagacgagtgatcagcatgtgcacgagtgcctctcggtcatgtacgcttcggccctgcgcgtccggccgtcgggctcgttcggacgcgatgctcgcccaacaggcgaccgcgtgttggccgtagctaggcaagcctgcaacgcccatctctcgccttgcttccccctttccagcttgccctctttcccctcctctctgctcgccatgtccaacttcctccgcaacggcaagaagattgtggccatcggccggtgcgtctctcggctcaggagcttcagtcgagccctcgctcttctccgacaccgttgctgatcagcttgcgcctgcctctccaggaactacaaggcccacgcccttgagctcaagaatgccgtcccgaaggagcccttcttcttcctgaagcctacgacgtcctacatccaggacggcggcctggtcgagatccccaagaacgtcgaggtgcaccacgagagtcagtgccgccgtgccctaagctggccgtgctcgcaaggtcgcccaagctgattagagccgacgctcaatacctcaagtcgagctcggcgttgtcatcggcaagactggccgggacatctcggaggcgaacgcgatggaccacgtcgccggctacggtgagcacgctcgaggccgcacacaggcgcgagcggcgtgtgcgctagctgacccggagggacggccacctgcagtgctcgccatcgacatgactgcccgcaacgtccaggacgccgtcaaggccaagggtctcccttggagcacggcaaagggtgcgcctgagcagcatcgcaagagaagttgcgctggcgctgacgatctgctcgcctgcaggctttgacaccttcaacccgatctcgggcttcatcccgaagagcgagattgtcgacccgcacaacctgaagctgtggctcaaggttcgtcctctgtttcgagcagattacctctggtccgtcgactgacgaccgcgcccttgcaacctgcgcggctcggctcagatcaacggcgagacgaagcaggacggcgtcacttccgacatgctgttccagatcccgcggctgatctcgcacgtcacgagcatcatgacgctcgaggtgcgttgtctgcgcttcatctgtcgccctgcactgtcttgaccgtctctcgtggtcgtcctgccgctcgcaggagggagacgttctcatcaccggtcagtctcggccgatgcggccgaacgctgtactcgatgctaacctgccaaatctccacgaccaggtactccgtctggcgtcggtcgcatccacgccggcgacaagatcacgtcgggcctggcgacggccgagggcaaggagattgcgatgctgaacgtcggcgtgacggaccgccagggcggctacgtcttctcgggctagatgttcgcaggacgaggatccgatgctgcctgtcacacatggcagacctcgttgtcgagagcaagaaggatgagcaccatgacgacgggcctgcctgcggcgtgctagcgccgggttggcctgggcccggggctgtgagcggggctgttggcggggaagggcccatcggccgaaggaaaactcgagtcagaccgcgggcgcctcagccgagctgtccgaacgagccccttgccttcctcccaccaacgacccgccacctaaaccccttagaggcatcttcagcacctcctttgcagcgcaaagccaggcctctctctctctcgctccttttagggtctcgtctttccttgccctttccggctcgtaatcctcgtcgcagcccagcgctcccgcagcccaccatgctccgctcctcgaccaagctgctcactcggcatgcccgcccgacggcggcctcgtcgtcgaccctcgccttccctgctacccagtcgaggcggtccaactcggcctcgatcggcaacatcccgccctcaaagggctcggcttttgccatgtcgcccgaggcaaagatgcggctcaacgcccagtcgcggctcatcagcggcagcgcaaagaagcccgcccaggccggcgcggcggcagcagtgtgagtctcttcaccttcatcccgggaggtttcagatgggctatccgagagcagctgggggtcggttctcgctggcaagctcctttagcttatcggagcagctgctctgctgcagcgacagctccggtggcgactacggttctgcggcttgccgccgctcgcccgcagctcgccctggcgcctgacagaggtcttcgacacaaaaggtggacctcgagctcacccaaacctcttcttctgcctgcagccgtcccgccccgtcttcgaacttccaggcgacacctcaccatgcgcctcctaagcatctccagaacgacaccgagtgggactacaggtgcgctcgcgctcttggcgacctggcggcgcgtgccttcagccgctaaacctgatttttgtgtccgtctcgcagctttgtcggcaagtcgggcggcgagatcttccatgagatgatgctccggcacgacgtcaaggctgtctttggctatcccggcgtgcgtcgccctcctcgggagaaagtgtggcgctgctcgactgacgcccttttcgcgtaacttcttgcagggtgccattctacccgtctttgacgcgatccacaactcgccccacttcgagtttgtcctgcctcggcacgagcagggcgctggccacatggctgagggctacgcccgcgtctctggcaagcctggtgtctgcctcgtcacttcgggccccggcgcgaccaacgtcgtcacgccccttcaggacgccatgtcggacggcatcccgatggtcgtcttctgcggccaggttgccacgtcggccatcggctcggacgccttccaggaggccgacattgtcggcatcacccggtcgtgcaccaagtggaacgttatggtcaaggacattgccgagctcccccggcggatcaacgaggccttcaagattgccacctcgggccggcccggccctgtcctcgtcgacctgcccaaggacgtcaccgctggcatcctccgccagccgatcctcgtcaagtcgatcactcccggccagtcgccgttcatcccttcgacgccgtcaacgatcgcggcatcgcaggacgacgagctcatccagtcggccgccgacttgatcaaccaggccaagaagcccatcatctactgcggcaacggcgttctctcgtcgtcccgcggcccggagctgcttgagctcctctcgcgcaacggcaacatccccgtcacgacgacgctccagggcctcggcgcctttgatgagcacattgaggaccgctcgctccacatgctcggcatgcacggctcggcttacgccaacctcgccatgcaggaggcagacgtcatcatcgccctcggcgcccggttcgatgaccgtgtcaccggcaaggtcgacagtgagttaccatctttgctttgccaggccctcagtcccgcagcagtcggctgacttccttcactctcatccgcagccttcgccccggctgcccgcgctgcctcgctcctcggtaagggcggcatcatccacttcgagatcatgcccaagaacatcaacaaggtcgtccaggcgacgatccccgtcctcggcgacgtcgttgccagcatggagacgctcgtccccaagattacacactcgccccgggccgactggttcacccagatcaaagagtggaagaccaagtaccccttcacctttgaggcgtcgaagcccggcgagcagctcaagccgcaggaggtcattgtcgagcttgaccgggcggccgaccggatgggcaaggagaacgtcatcgtcgcgaccggcgtcggccagcaccagatgtgggcttgccagcactaccgctggcgccagccgcgcacctgggtttcgtccggcggtctcggcacgatgggcttcggtgtcccctcggcgatcggtgccaaggtcgctgcgccggagaagattgtcgtcgacgtcgacggcgacgcctcgttctcgatgacggccatggagctcgcgacggccgcccagtacaacatcggcgtcaagattctcatcctcaataacgagtttcagggcatggttctccagtggcaggacctcttctacgacaagcgctactcgcacacggccatgacgggcaaccccgactttgtcaagctggccgagtcgatgcactgcaaggctctccgctgcacctcgctcgaggacctcccggccaagatgaaggagttcatggagtacgacaactcaaagccgatcgtaatggagtgcgtcgtcacccggaacgagcacgtctacccgatggttgccgccggcaaatcgctcgaccagcagacgttgcacccgatgctgcgcgacgtcaccccggccgcccagtagacggctctcggttaccttctccatccttaatcactctctaccctcgtcaccccgctcgcatgtacccctcgcctctcgtcctcgaaaaagggctccagcgcctccccccaagcatctttcctatacttcgcttcctttctccgctctccttccagctttccctcttcacgacgtgttgctccctccggcagtctcattgtatgattcgcaattatcgcactagaataatccagagcgcgggccgttcgtcggcagcgcagacttgtgacgttcctcgaccccgccgctcactcgaagcaggggcagcccagctctctcgatctgaagcacaacatggaatcggcaggtgacgataggcagttcagtcgtgccgcggccggaagacgactttgcggactttgcgctcgtcaaacagtctgtaggcctgttggggcagggttggatcgtcgctcgtcagttccttgaattatggtcagagaaagggaggtccggacctctggagcgtcctcgaggtccatccagtgcgagacgaaaccactgccggcgccatcgacgccttcaaacagcgcgcgttttgcacgcagaacctccagagcctcggggaattcggcccggacgggacatcggccgaacgcgcagcgcaggttgaggtcgtacgtgtctggtccagagaggagggaggggtcgttgtggacgccaacggaactgataactccgaagggccggatgagcgagagagccgtcttgtaggcgggcttgagtctgtgtgcgagcatacgcccagtcagcgaagagaggagaggagaggagaggcatgacgtacccgacgacctcgagcacagcatcagcaccgcgcccgtccgtcctcaagcggatgacggctagcgggctagcgtcgccttggccgtcaaggtgtaaagcgattgcgccgtgcctctcggcctggtcaagccgctcctggacgctgtcgacggcgtagaggttgcctggccggacccacatcgaggccgacgtgatggcgcagatcccgacgggcccgcagccgacgacgacgacgacggcgtcagcgagctcagactcaggcagcatgtcccgcgcattggatgaggcgtggtgcctgagaagcctggtcagccaccacgggagcaaaggccaaggaattgagactggagctcacccagtcgggagaatgtcggccaggacgacgagaatttcgtccgatagatcctcaggcgcgtgaaagagcgtcgtgtctgtgaggcgaggccggcatgagcgtcagctaagtgactgagagctgcgcgtcgctgcgcgcgcccgagacggacgcacctccgagcggcactctcacgtagccagcctgacagccgtcgagctttgggctgccaaagagccggctctcgtcgcaccggctcgtgaggccccgcttgcagtaccagcacgaggcgcagctggttgtgaagggcgagacgacgcggtcgccgacggcaaaggtcgcgctggccttctcgccgacggcatggacgaggccgacgagctcgtgcccgaggatgaagccggcctcgggccgctccagaccgcggtataggtggagatccgagccgcagagggccgtcgcagtcactgcaggtcggcgacgactacggacggtcagtcgtgctagacccagcgggaaggcagataaggtcgacgcgcacccttgacgacgacgtcccgctcgtgctcgacctcggggatcggccgccgctcgacggtgatgctgcaacgggcctggtggtcgccttccgcacctgcgtagccgttgtagatgactgcgtccatggtcgaagaggtgacggttgctggctgagagcgggtcgacgcgctcttcggacgctcaagccgaagagcgaagcgcagcaccaagcagcacgcaccggccagcgagtcagagcgcccactctcgatgctgccagtcggaaaccagctgctgttaaggcgacaggtgcctgacccagtcgctagctgcagactgtagtgcacgaacttgcctgccgttcagaatggtgctgcccgctactgccggcctcgcccgttcgatcgctcactagtgtgacgttcgcgcgggcggcggtgctccctctcgcctgtcgaccagcccttcgctccctccgagccaccagcatcacccctccttcccaacctcaacaagcatagaccatggcttttctcggtgcgttgcatggactgcggccgcctggtcaagagcgagagctgaccctgttgcgatgtcgacggcctgcgtgcaacaggtcagcgcccgcctcccttagctcgccctgcaccctcgagccgcctcctgaactgacgcttcctcaccacctctcgctctacagcaaagaagatcggcaagcgggcatttgcctcccatctcgccgcctacgagccccgcgacacgctctacgaagacgccgtcgctggatccaagaagcgagtgcgggtgcgtctccgagctcgggccggcggcttccatccagcgcctcatcgctgaccgtagtatctgcccttccctcgcagcgcgagctccctcgtgcgtgtcatcggctgctacaatgatagcggcaagtatgtaccgttgctgacggtcgctcgacgcctcgtcatccacgcctgcttcagccggcctcagcccaaaggaggccaaggtgctcaagaagctgcgctccagggcccactacctcgacaaggcaagtctcaaaacagcggagcacgaacagattactggatgttgacatgctatcactctgcctctcaatagggcatgaatctctgcgggtttcgtgttggatggacgttcttcatcgtgcgtgcactggtcacccctgcatagttgccacgactttgctgacgatccgacgtgcttcatccacctccagggcctgatcccggtgcgttatcactgtctctggcttgatctatacccgctcgccgtcctcgacctgacagtcagcccatgtcccccgccaggtccttggagacatcatcgacgccctcctcaactacaacctgatcgtcaagaaggcccgtaaggagctcgacctgcccgactacctcgtcgccaccatgatgttcaacaatgcagtgtcagccggcgtcggtctcgtcccgctcgttggcgaccttatcctcggtatctggaaggcaagtcggacgtcgtgcgattggtcgccaggctgccagcgagtctgggctgacttgttgcacccttgtctgtctgacaggccaactcgagaaacgcgcatctcgtcgaagagtacctcgctctcaaggctcaggagagtccctaccggcctgatcagcccacctacggcggcgtcgccaatgccggtgcgcctgccgcggctgcccaagtgcccatcgccgccgcgccagcgaggggtgtcggcaaggacgggcgcaagtgacgccccccgactcgatgacaaagactccaccgttctggcggcacgggagccgcttcagccgctcgaggacgcgcaacgacggacacccttagctactactacatgacgatacacgacgcttacactctagtctcagctcgccgccttcctttctgccgcctctgcgcgctctctacgccatcgtgggcctcggcgcaagatgacgacgggcatccaagcgaaggccaggcagacgccggcaatgacgacctgaaaggagaacagcaggacgtagtcagctcggatcacctggctgagctgcacggcgggttagaaaggcgactgacaaaagcccagccggggccgaccctctggattaaaagctcgatcgccgccgttcctgcagctccgaagaggcagctgcggaggtagcaagggtggcaaatatcagcacgacagggagtttgccctcggcgaaacaacaagtcggacttaccgcacaacattatttgatgcagagatgctgcttcccttgtccggctgcaggtcgatcaaaacagttgaagcgatcgacataagagggctgttgaggtcgctcgcaacatgccgcgtcagcggcagtgccagggtgcacttggatctctcgagtactcacgttccgcacgctccgacaaagaactcgcacacgatcggcacggcgatgtgggcaccggcttcgatggaccagccgaagccgatgatggcgacgacgaaggccgcaaagagcagcggggtccatcgcaggcgtgctcgctcgagcgggaagaggtggagcggcgtgtcgggcggcatcgtcttcttgagccggcgaaagtcatagtcgagcacacgaccgatagcgaacgagccgagaaggcagccgacgccgttggcgaggtaggtcaggccgatctcgatttcgtcgagcccgtagcgcgacttgaattgcgaggttgccgccgtcagaacagtgtagaaggccatgtaggacgcgctgttggcgaatagaaggagagctacgtctggctgaaagatcatcgtgagcgagtcgaacggccgaatcaggcgccagcgctcgcgaaaggccattgccggcgcctctcgctcgtcgactttggcctcgacgtcggtcgtgggcgccttcgatgctgctcgccgtcgacggatgaaggcgtagagagtcatgttgagggctggaggctgccggtcacccgcgccgaccagactccgcaacgtctcgggaaacaggctgcgcaacaagaaggttggcggtcagctgccacattccgaaccctgctcagaccagaactgacaagacgaggggtacgagacagacaccggccatgatagtgagtagccaaaagatggcccgccatccgaggtattgcgcaagaatgccgccgagcactggcctaggagtatgcgagtacctgcgtcagctcgaataccagaggcgggcgggggggtgggtggggaggttgcgcacccgatcgcaggccccaacatgactcctgggtcgaaagagcggcatgagtcagatgcagcagtcttgaagattgaaccagggcgtcgcaaaactaaccgagctggtaccaagcaaagaaggaccctcgctcgtgcggctctgtgatgtcgccgaggacaccggcgccaagtgcgtacgtacaggccccgccggtcgcctgcagcacacgcaatgccatgagtccgccaaaacttgaggtcggaacgagcgcgaggccgatgcaagcggcgatataaaggctgagcgccgagacgaggaccggtctgcagggcgaggttgtgaggttcagcgtcggctgctgatcacaagagagagcatcaagagctgggatgcgggcctcaccgacgacctatagcgtcagccgtgctcgcccagagcatcggtgtcaggccctgcgccacgaggtagaccgctgatgcattgatggcctactggttagcaagggcagtcgcgaatcgaaccggctggacgtactcagcgtcagattgatggttttgatattctcgtcgaaggcaagtgcgagcactggaagggctgggatgtagatctgaacagcgggagggaggataagcacatcgtctacggcctgacacgcagacgcccagggacctacgttcgcgccgagtgggccgaggaacgcaaccgaagcgacagtcgctacaataaagcccgtcgtagcgggcgagaaggccctgtgggcgggcttcacgacccgcgacgccagatcgagctgcgagggcgaaggcgagggcaatgagctgacggccgctgggtcggctaggtccgggtcggcttgcaggtcgccggttgccgaggtcggcgcgacggcggcggggttgggcctggccatgctatcgatcttgctagtcgcgagcattgagggcggatgaggtctcgaggtagctcgaagagggtcgggaggggcttcgaaagcttcctcatggtcgtcgagggcgagtcaggcgagccggaaggggtcggagcgacgtcctgcggcgaagcaagtggagggccggccgctcggccgcggcgcgccgaaactctcgatcgcttcgtcggagctggtcgcaggggacgagagacttgagaacgactcaggaacgaaggcgatggagaagggctcatgcgcagatgcggactgtcccgtcaaagccgcagcttgcgactcgtatgcccgactcgccctcggtcgtagggaggacaaagacgtcgcgcacgcgatcgttgcggacgcctgtcgtcgggtgctcaccgtgcgccctgatctgagcgcggacgctgccgagaagagaggagagcagcgtcggtcaggcagaagtcatcgggcggcataagggaagaagggacgcaccggccttgaagatcgatgatccggacgcaaccatcgtccgacgtgacgcaaacggccgacccgtctgccgaccaactttgccgcggatttgagaaggcgtccgactctggtagccaaagaagggtcagcagatgtccaaatgaggcactgttgatgctcatcgatggatcagcgacgtacccgagccagtccatagggtggccgcgcgttgcgcgctcaggaacgggtaaaggaagatgcgcgaggtcgacgagctggcgtgatcgcccgtcaagagcgagatgagcttatttgacgggtggatcgcgagagacctgggcgtggagtcacttgtatcagtgacgattaaggagtgaaaaggcgaagggcagagctcgcacaggatggagaaagacctgggccacgcatagaagggtcggtcagctaggatcgctcgcgagtgccggtatgcagcacccgactcacacccaggcgtcgccgttcgggttgaggttgaacttgcaaatatcgtaatcgacgccaatctcgtgcccgccctcgggcagcatgatgtatttgagctgatggtcgcctcgctccgtgtaagcgagccaggcctcctcgccagtcgctttaggcccaaagacaaggccttctgggttgccggagcattcaaagttgcgccgtaggatccagcgcagtgggcaggacaggtccaacggatcctctgccagctcgtcgtcttcggtggcttccggagcagccgggaccgaggccgggtcgagcgagtagagcgcgatcgtccggtcgtacgaggcagtagccagccaccggccgtcgggtgagaaggcgacacggacgacaaatttggcatgcttgaacgtctggagaacctcgcctttgacgatgtcgaggatcttcgccctgttgcccgtgacactcgtgtcagcgtagtccgccccgaggcgcagtagcgcggtcaagccgaccgctctccagctcggccgagaactcacgtgccgtccatgctgcccgtcaggagaagcctcggctctgtcggatgcggtgaaacgcagatgatggccgcctggtgcggctcaaagatgtcctcgacctcgcctgacgcgagcgacgtgagcttcagcgtcttgtcggcggctgtcgtcacgagcaccgtcgaccgggttgtctcgtacctggcggcagcgaatgggtcgatgggtcagcccctcgtgtatggccgccacagcagcagtagctcggcttcggacgcactcggccgtcgacgtgttgaacgctcggcgcggaacggtgtgcgccctgaccgtgagcacgttgccactgtgaatggcgccgagcgtctgggcggccgcacgcggtacgtcctcgtccgagagctcgagcttcaggacgtcctgcgcaatgtcgaccttctcgacgacgagcgcctggagcgactgcgccagttgctcggcgttgtgctcctcgacgagcgagcgcaggctcgggatctcggctggcaccgggccggtcgaaggcgccgaggttcgcgtctcggcaaggaaagcctcgagcgatgcgtggtactgcgggtcgcgatgaccgacaggttggtcagtagggctgctgcagatggtctcgaggcggcggcagaggagacgtacgccagagtcgagcaagaagcgggcgacgacgtcgtgcgccgagacgaccgcttttgtcgaggacgaagaggacatgctgaggatttcgaagctgctagtgctctctgaagggaggatgcggcgagcgagagcggacgaaggggccagcgaccggggggatggtcctgggtcgaccgggtcgacggcttcgcggctgatggtgacgaaggagctccgagcgcagcagcgagctctgccggcaaagctggcctccgcctgagcggctgttcagcttaggctagacagctgaagagcagctatccaacgatcagatccgagctgctgtgctgccccccaaccgccctgaagaggtgctggacgagggcctgggctgaacacgagcgtcctgccggagctcgatgcgaagctgccaacctcttccggcagccttcatctggacgctcaaagacgagacctcagtcaccgcgtgggccagttgtacaagcaaaggagagcccctcatttggcacgtcagctggtccggccgggctggccgatggcagcttgcgacccgggacccgacgtccttttgaaagggaaagggaaaggttcgcctgtcctcccttcccctccggccacatcctccgctctcgtctttcctcccggccttcctctctgacggtcgtcccgtcggtgcgtccaatgcttacaagctccttcttcctttccattctaggttcatcgagctaaaggaggaggcagccttcctcgtcttcgcagtctgcccctgagtctacctcaatccgacgcgcagccggccctcctccctccgacctcgccatgacctcaagcccggtcgctctcgagccgcttctccctcgctcggacgaaagaactccaacatcgcctcggctcgagggagccggctggtcgccccctccatcgccgttcgcctttgtctcgttcgctgccaaagaccagaagagccggcgccgggccgtctttctcctcctcctcctcgccgtcgccgtcttgaccggcgtcctcttcaagctcgacgatggcgttctcgagactctgatacctcgtacgaggagcgatatcgtcagtccagcggcgcaccttgcactcaaggccgggcagccgccgggcgagcacttccgaggtcgatgggcttctattgcactgtccttcccctttcctgcagctgacgctggggtcaacgctgctcttccttcaccagacagcttgctctcggaccggcgctacatcacatcgttcagtcttgccggcttcaacaatcaggtgcgtctcgacctttcaccatgccgacgctgcgcgtcccaaccgcaggctgactccggcaccccgatcgacgcctttgcagatcatcggcgctatgaacctcctgcacctcgccttcgtccttcagcagcagccatacccgctgccgcacgtcgtcatccttccgccggtcacgccacactacagccacctcgacgcaaagggcgcgacggtcgacccgttccctctcggcagcgtctttgacctcccatcgtttgagagaacgacaggcgtcgccgtcgtaggctgggccgacgtaaaaaacctccaggacgttgacggcgccgctcgggaagaagtcgcctgctgggccccctggtggacgcagtttggcaacccgatatcgggttggacgatggagcggcggttgggcctcggtacgtccagctgcgatagtagtcgcatccgactcaaactgaagtgtcggccccaaccctctgcccgcagaacgcatcctgaccccactgccgccctcgctcctgacgccaacggacctcgctcctccgcacttcatcttcaatcagctggccgcgctcctgaaccctccggacaatgccggccggcgtgacttcctgagcggtcggtcaggcgacggcgaccggctgatgcaacgctggggccgcggcgacgagagttggcgcgacgcttggggacccgacgttgccggttggcgtgagccagagggccgccacgagggcgagcttgtctgctttgacgcggcctacttccttaccgagcgcggcgaggaagtccgcgagctctaccagggtcgggccgaccgagatgccttctacgggccctggtccaccgtcggccgacatcttcgctggaacgccacgcttgaggctgaggccaaggctgccgtccgcaacgtgctcggtctctcgactcggaaaatgctgccgcgcttcttcacgatgcacatccggcgaggggactttctcgacgagtgcctgcccgactggccttggtttgtccgatcggctcttacgactcctctcctttttcctgctgacagacgctgcctactccctcagcctgcgtctcgtgcagtacgagagccaccttcggcgcctgcgggagcagcttttctccgccggcttcggaagcgccaacacctggccggtcgtcgtcacgacggatgagacggaccctacgtgcatccccccacccttccgactgggttcagcctgcactgctgaccctctcaatgctctcaggtacctctcggagatcaaggccaacggctggcacctcgtcgaccacgtcgcgctcaagacgaaggaaaagatgggccactgggggccgaccttgatcgacgtcgtcgcgctctcgctcggcaagggcttcatcggtgcgttgcgcgggctcgaagttagaactattgtcgaatactgaccatccttcctcctctccaggtactgcgggcagcacgatgagcatcctcaccacgcggcgggtccaagactggaacgggggcatcgtctcgctcgtccgcaaagacgagcagcttgacccgccagcgagctcatgactgagcccggtggacggctcgctctcctttcgtctctgcatgcagttgtaagatacagtagttctcgggaagattcgcgaccgaaaagatgagaaaggagaggagtgccgtcgggaggccaggcggcacttggccgcgctcgctgccgggacgctgcgcgctacgtgtgccctcaagcgagcttgaacttgttgcgccggtcctctctgctgatggcggcgtcctcctcgcgggccttcatcgcctggcgcatccggtcctcgggcgtcgaagcctgctgagcctccttctgcttggcggcctcggccgcggcgtggtcctggaacgaccgcttgggcgtcagcgtcggcggcagctttgccgcccggatggcctcgggcgaattgggattgtcgagcgcttgctgaagagcctcggccttctcagcgttgcgctctggatggaaagtgtggcggactggtaagcgagagagtgagggcaacggcaatcgagaaggatgacgcaccgtagcctgcgcgggcggttgccgggatagacagcagactctttacgggatgcgcgccctcgtacaggacgccgccgatgacgacagcaacgatggcaaaggcttgcgcgctgtaagcgtatggaggggctttgtaagcaaaggacggacggctagcaagtagacgaggaggacgcacccgacccgcagccggaagaacagctgcatttgcttctgatttccagctcgcattgaccggacggcgccgacgagcgcaaagaaggtcgccgccgtgcctgttccggccgagaagagagcgacagcagaagggagggtcaacatgaggtgcaggcgaaaggtcgaggtcgacaagtgctggccagccccgctgacgggccctgctcgacccaacagacatccttccaagccagatcggcggcgatgcagagacgtaccgagcgcgataaatgggttttgcttgttcttctgaacaaagttgttccaccgacgctggccatcgctcatcggcacctccgacacgaagtcgtacgggatctcaaactcgggcggtgagctcggcgacgagcgcgaggagctgctggccgaggcgacggccgccggcgacggggctgcggccgagagcggggctgagccgccggcgggcgtcggcaccagatcggggggcgaaggcgaagaaagccggagcgtgcgaaaggggaggaaggagagcatcttgacggagtgaaggtgagggcggaggacgaaaggtaggagatcggcaagtgcgtcgcgccggcgctccccgcatcggagttcggcgctcctgcgtcagagtacttccagtcgctcctgcacacattacagccggccatcctgcgactgcgaacgcacagaaactaggtctgggatcggcatgggtatagcgcaaagggtatcttctcgcccggtgggcgctcccgggcgggcgggcgcctgacggctaagcgctctgcaggacctccttcgcttgggcgatgaccttgcgggggaggaggtggaagaacagtcagactatgcattcagacgagggcaggtctggcgagacgtacctcgtcaatgtctggccgcttctttgggtcaacgacgatcatcgaatcgatgagcttcttgaaggcctccgagtagggcgagtctcgcggatggcggtacgacgcgctcgcgacgctcatgttgattgagccgccctgatttgccgggtcctcgaagggcgagtacgagtaggcgatcgcgaagaggaggcagccgagcgcctggcaagagccggaacggctcgtcagcacgcaatcagagaagcggagtttcccttgcgagacgacgcacccagatatcaaccttctcgtcgagcgtcgtgttagtcttgacatcaaagagctcaggcgcgcggtatggcatcgacgagtgctcgctcgcaaggtcctgctgaagaagcgcctcctgccgcgagcggatctcgacccgggcgcgcacggccgagccgaggtccatcaggatcggcgagccgtcgtcggcgaccatgacgttgctgcaggaaaaagccatgcccgtccatcagtcctccttcgtgcatgcagtaggccgcggttactcacgcaggcttgatgtcgcgatgagcccagggtaccatgccgacctcgtctgcgcccggatggttggcctcgcgctgcttacccttgcccttgccgttctcatcaatgacgtcctcgccgggaccctctgtccgggcggtgctcgcggcgttatgcagaaggaaggccccgccctcgccgtcatcgtggtcgccgaggccctcctcttccgcgttaaagacggccgaggcacttggcggatacgaagatgccgaggcggcgtccgccgatggctggttctggtatgacggcttccactggtgcatcgcccgggcgccctcggcggtcccgatgaagaggtcaagcagctggcgctccggcgggcgggatgccggggacgtagctgacgaccgggtgatcagatcttgcaggttgccgcgctgcgtgtaaaagcggtgagtaggaaggtcatcagcgaagggcgccaagcgtgtcggaacaaggaagctgcgccgcggtcactctgacgcacagggtagaacggcaggaacacccagacaatcttgccctcccccgactcgtcctggacgacggccgaatcgaacactagcggcaccgaaagatgtcagcgtcaggacaacgggtggcagcacctggcctgcgcacctcggatgatatgcgggctcttgaagcgccgcatggcctctacctcggcgagcgcaaccttgacctggtcggccgtcgtacagcgaattttcttgatcgcaaactcgcggccggacgaaatgtcgcggacgaggtagacgaacgagaagcctccctcgccgagcaagcggacgagcgtatacgttcggccattgatctacaagccaaggggtaggtagcagaactcggccgtcagcatctctccgtcacgccgaccttcacggccttgcacacaccttgagctcggatgacggcttgcacaccgtcgcgcagagcgtgttggcgaaatcggttgcgtagaactgagcacgagtgcaagcgacagggtcgaaggaaaggccgagcctcatcagtctccggtcagccaggcgcgagtcgttcgagccgacgcaccttggcgcggtcaataaagatcgcgagcgactctcccatggcaagcgggtgcgaagacgacgtcgtgggctagagtaagggtccaggcgtggcgtagggtgctcgagacgagacttcaggtcaggtcgagatggctgttggccgggagccgagcttgacctcttccccctccgaccatctcaccctcctcctcgcacctcagccctcttacccctcccataatcatggcggacctcgagctcgaagcaggcatggacctgtgccgccgtctgcagccggccaagatcgaccagacgctcgaagccctctgtcagtcgcctgcccttgaccggcctcggccgccgcctgctctccgcttgctgatgatccctgcggcttggcttgccttccttacttcttaggtgccctcgtgcccgacgctgccgacgatctgctgggtgcggtcgaccagccgctctgtatactcaaggacgagagccagaaccgcgagttccttgcttgcagctacaactgggaccagacgccctcgggcgaggatgcctggcggtgagcaggggcttccacgctgtcgacatcccgggcgttgcagacggctgacatcctgagggcttccgactgtagctcaccctggtctaatcagtactcgccgtcgatcgaggacggccaggtgccggaggaccgtctgcgcgagctcgaggtcgcgatgaacgacgccttcgacacgtaccgtgagatgtgcgtcgtctgccgagtacgtcgtccgtctctcatatgctgatagatcgccgtctctgcaggtactttgagggcggcgtatcgagcgtctacctctggtcgccagaagacgacaaggacaagttcgccggcgtcgtcctgctcaagaagggtgcgagagtcgacccgcccgctgcgcgccccgaggcccacttgctcaccctccaactctcttctccctccttgacctcagtccttccggcacctcaggagggtcagtctgccgcgcgtaagcattttggttttaagcttgcactgatacaaggtcggcccgtctctgccccgacacccaggctcgtgggactcgatccatgtcttcgaggcgcacgagcgcggccggacggcctcgtacaagctgacgtcgaccgtcatgctgcgtctcgcggccggcagcgccgagggcggtaagggtggcgcggtcgagctcgcagggagcctgacgagacagacggaggtcgagggagttgcgcttgccgggccgtcatcgcacgtcgccaacgtcgggcgggccgtcgaggacatggagatcaagctccgcaacctgattggcgaggtcagttttcatcgaagccttggaagaggtctcgctgcagagagcaaagcgctgattggccgtctcgctcatgcaggtctactttggcaagaccaaggacgtcctgaacgacgtccgcagcttcggcgggctcgagcgcaaacgcaacgaggacgcgctccggcgcgagctggtacgtgtggcgcgcacttgctcgtgaggtttcactggcgctaacaccttgcgcttccttgctccctgtgcagatggccaacatgcgtcgctgagacgcccgaccccgagcccagcgcttaatgaccaatgacgagatggctctgcgagtcgtatcccgttctcagctggcgcaggaagggcgtctagatggtcatacaggcgaaagcagtacgtgaaggtgggcaaggaaggtcgtggcaggcggagcggtacaagcgatgagagggcagcagcagacgggatcgaaagaccgagctcagaactaggggcaaggatgatggaggggtcagcacaagtcggcagagggaacgctgtagacgacctggcggaggtttagacgtacccggacctggtagctcccctgggctttcgtcagatagcgcacccacttgaccgactggtagttgcctttttcaaacaccttgaggaagcggacgagcaggcccgaggcggtaaacatgacgaccgaaaagtcgatgttaatcggcgggcgcgaccaggcctggcggtgggtcgtcgccgtcagctcagcgtcggccgagagcgtcgcctcctggccaccttggagtcgcgggatccttagaagggatgggagtcggccgatcagtgaccactcggcggggtagcgaacgctcagcgggcataacttacttccagacgatgacgttttcggccggcacatactttgccttgccgacgacgaccttacactcgacccggaccgtgttgagcggcgtcgggatccggaggacgatgccgttggccgagagcttgtggtcaaagttggctttgaggttgatcgcgtactcgaccttggacttgccgacttcgttgacgatcgggtgcaggcggaacggcagattgatgttggtcgtcgagcggtacctgcagtcaaagcggtgccggtcaacactggtaaggaggactgcgggcgaggcgaaggcccgcacctcatgagctcaaactcgccgtcgggcgggatgaaggatatcgaccggtccgagtcaaatttgccgagccgcacgcactggtggaactggcagtcgtcgagctcgaccgcatcgaccgacttggagcggtcactagaagggtttcagagccaggtcaggaggctgacaagtcactcgtcacggaagtcaggggacgtacgacttctcgaggacaagcttgtcgttcagaccgaacttgcactctggcgtgcccgagaggtaggccctcatcaagatctggccgtcaacgtcggcccggagcaccgttcctggaggaggggccggtcccatgtcagccgttcgcgctttggcgaagaaaaagggagcagcggcgcaccggtcgagctcatcagcaggttgaccgtctcgatgacgtcgacaaaggcctcgttcttgcggtacttgacgtctgctcgccgccagctggtattgcccgtcgcttggatggtaatcttagacgagtcctcgcgctttgcgagccgggcgggaacgcgtcagctgggcgcgcgctgcgagtctgggccattgcgaggcacgcacgatcgccaggtctgacttaacgccctcggtcgtgatgtacatcttgagggtgtcgatctccgagttctgagggtagccaaagtcaaggatctctgcgatcgggagacggtgacgcttcggtcagggcgggttcgagcagcgcccgcgcaagacgcgaggccggtgagccagggacggaccgtcgaggagctcatagataaggacaaagttgttcttgacgctctcctcgtcgagcttgccaaagtaggcgcgggagatcgagacgaagcggtagatgaactcgaagacgagggcggccgaggcgttggaccttgtgcgcgcgggggacaaggcgcgtcgagagggggaagtgagaggagtagcacgggggtgccttcgtcagcctcatcgactgcgacaaagagcgagcacagagcccgccgatgatggcgactgagacgcacttggtcacggccaggacatagacattgttgacccggacgtggaagaaggacgtcgagccgagcgtgatgatgggtgagcgcacgtctgggttcgagacgacctggatccggaagacgtcggctatcgaccgcctgcgagctcacgagacggtatcagcgctcacgtgcagattatgagagctcaaagagagacacgcacttgaggtccgaccggaacaggcgcgagatgagcacctggagagggaggagatcggaaggtcaggcctcgggttgaacaagggatgagcgagccgcagcgccggccgaccgaacctcgcccttttggttgaacacgaagaaggcctgcgagcagagagcagaagggatcagcagctggggctggccgctcctcgagccagtcccgacctaccgagatcatcttgccagggagccagagagggtgggcaaggggtcgctgtcggtcgaccgacctcgtccggcacttcgcctgcgcggacgccgcccgagcctcagaaccctcatccagtcacccggccatctgccactcattcgcccattcgaccctctcttacctctcttcagcttttagagcgatagtagcaggtacataggttcatgtctgttcgacttgcccgcggcagaggctgcagcaggagcagctgcagcctctgccgcgggcaagtcgaacagacatgaacctatgtacctgctactatcgctctaaaagctgaagaggggtggaagggggggggggggggggggtgggagtcagagaagggtccccattaggtgaagattcggctgcgacgtacagcagctggtacttgtagatgtaatgcgaaatccagaagacgatggtcgaaaaggcagtgacgagcggggcgagcggcgcgtagatctggttcgacgacccaacttagcgtcagtgttcagcgagagaatccaggggcctatcaaaggtactgacgaggccgacggcgacgaggaagaggatgttggcatagacgacagggtactggaagagccaagcaaaacggaatcagcgattgagcgacgacagttttgtcagagaaggcagctgacctggaaaaaggccggccgggtccagtcttgaatgtcacgtggcgtcttcgcaaagaggcttttagggcgagctcgaatcagcgctcgttgcgggaatcaagaaaccgaggtcggagcggacgcacaaagtcttgacgctgataagagctagcttaacgagctgggcaagctcaaagaaggcaaggaagccgcgcatcggcatgacggtgagccagtagacgttttgctggacgtaggtccgttggatcgtccgcggcaggtctgcgagaccggccaggatcttgagcgcgctcttgccctggccgacttcggccgcgatgttgacgccgagctggacgaagacgacgagcagcgagaagatgaagaactgagagaagacgaggaaggcccagtagcgggtaaagacggtccggtcgacctgcgagcgcgagacctggaggagaatattgggaacggacggtcagtgctgcttcatccggcagctgagatcggtcgatacgcacgagaccctggtacttggtgatcttgcggatgaaatagggcaggaggagctggaagatggccgagacgacgggcggcaggacaccagaaacggtcgaaaacgtccagttgccaaagttgccggccgactgccacgagcggaggaaggggacataggcgctgagcgagacgaggttcgacaatgcggcgacaatgacgagcgggaccgtgttgagaaagcagacgaccgtgaggaggaaggcgccccagagcttcgagtttgcgcgctcggccggcttgatgttcgcattctgccagatgatgtcggaaggcgccggggcgagcatgagtgaggcgccctgaagctccttgctcttgcccttgtgggcccggacgatggcgtgagctggcggtgaaacggtgggttgtcagtcacaggctaagcagggatgcgagcgtctgcgtgacgcaccttgggcggcgtccatcatgctgacgaaaccgtagttctcgctcgggatcttcatcttgcgggcgcgctcggccttctgcttctcggccttggccgcattgctcgagtactgctggttgactttcttggcgcgcggcttgagcaggtcgatgtcctccttcttggcgtcgaggatctctcgcagccggccgagcttggtcctgggtcggcgaccagcagcaccagtcagcgagaggcgaaaatcgagagtgcagcaggggtgggaggacgcacccgtagtattcgatcgcgtcgaccttggtcccacccatgcccatgaagccaccgcgacggatgaggggccgctttttggcctccttgccacccttcaggtacttgacgaggacctcctcaaattccttgatcgtgtcgttgtagtcctcgatcaggcccgggtagtctttgaggtcgcggccgatcgagacgttttggatcgacgaggcgagcttctcgttgccgccttggaggcgcatcatgagctgccggaggccctcgtctgattgaaactccttcttgatgttggtgatctatcaaaaggagcaagctgttagaaaagagggctcccggaggagacgcgtcgggaggcgcaccatgagcgaccggctctggatcgaccgctgaaactttttgctgaggaagaaggcctgccggaggccaagcatcttctgccagtaccaccagacccaaaagaggcaaagaaaggctgtgatcggccggcgggaggaagtcagagagcgcgacgcacaatgggcagggatggcggtggtagactgactgatgaggtagctcgagccgacgtggacgaagagaacgttgccgttcaggccagcaagcgtcaggaggttaagcttgttagccttagccgagtcactaccgcccttgagcgtccagacgactgcgtcgaatggccgggcgcgcacaagtcagatgctgctgacgtcgcgggcagccagacatcgtctgagctcaactcaccgttgaccgggatgagaacggcgcagacaagaacggtgaccgagaggaagaaccagcgcaagagcgacaggaattggaggaaggcgacggcgtcgacgcctgaggagcggagatacgcagcgaggcaagtcaggtcagacgctgaaagcagcgagaggcagctcaaacgtggaacactcggacgaaccgatcgtatggacgaggtctttatcgccctgactcagcagcggcgtcaaccagctgaagaagccgttcgagattggcggcggcgggtcgtcctcctcgtcctgggcgcggtacttgaccttgggtgcgtagactttgcgctcgcgcgggcggaagaaggagaaggcgaggatggtcgcgagcgagatgcccgacatgaggccgacctggatgccaactcccttgatgttaactggaaggcgagagcgggggtgctcaggtcagctcgacgccagcagccggaggcgaaacgacgcaggcgcggccgcgtaactgagggcgagcaacagagcaggacagacgcacccgacgtgtacttctcgccggccttgatgctatggagggtgagactggtcagccgcctcctcaactaggagacttatgagcagcgcaaactcacaggacatcctggctgtcggaggcaaggtggcgagcgtcatcaagagggcggtcagctcctgtcgagccggagggctgccgaacgagccctgcgagccagcgggcgacgtacaggtcatcggccatcttgactggcgatgccggagagggctcagggaaggaggaagcgaaaggctgggtgccgaggtcggccggcgatgaggtcgggcgaggaaagggctgagggctggaccggtcgaggacaagggctgctgcggaaaggcgcgctggagagaatgcgcgtgcgctggacgggtcgatgcgagagaagcctgagtcgagaaagtctgccagatgttgagcacagggcagaaggcgaggcagaagagacttgggtctgcttgaggggacgagggtatggtcggagggtcgaagggcgaggaagagggcgagtgacggcgagcagcggagcgtgacagcaagcaccccaaaagaggccgcgcgcgccgccaggaaataaataaaaggcaggccggccctccctttgtcgacggcttgaccacctccgatgacccgtcgtatcgcgacctgctgagagctgaccgcgaccgccgagcggggcgagagatcacgacggcggtgctgacctggactttgccagcttggcgcacccgtttggcggcgtcgttgggcggaggacaagacaacgcaggcgctctatcaccgggcactcgtgcgccagcgggggcgcctggaaggacgccattcgtatctctgtcgagatgcctgtcgacggtcggtcaagaagcggcggatcaatggtcaggagccgcatgctgccgcaggagccggcctgacccggcatctgtgcgccctccctgcagcggcaaggcagcacgaatgcagagcgacagccatcatcttccaatcgtcatttcgagtttatcacccgtatgaagctgttagtcgacagtgtgctaggcggacgtgctcgtgcgtacggccgcgctccgcctccctttcatgctcgtctcgcccggcgcgccgggacccctgtcgacgctccttttgttctccggctcgacctcgaccgccaaccgaacgccattagtctcccttgcggcagctgcaacggcgtcttcgacgacacccaggtgctctgcacgcacgtctcgaaggtccactggacgatcctccacgtcaagctcactcctgatggctcaggtgcgtcttctgccggcgcgctcggacgactgagctcgcccaagctgccccagcacgtcgctcttttgctgacagcttgactcctgcttcttttctaccgagcagtcttcgagctacgccgggcgcccaaaggcctcttcgaatgtgtcggcagctgcttctgctcgtccgagtcgccttggtcgctgcgcaagcacgtcgcgacctgcagccgggtcgccatcgccaagctcgctgatgagctcccgtggccggtcgtcgccggcacgacgcgcgtcgacggcaagctcgcccagccgggcacggacggatggctcgacaggcatggccgtgagcgtcgaatcggcttgacgctgctgcgtgcgcacggacgtgatgctgacacgcgccaaaacccattccccctctcgctcgtcctcagggcgccaggacgcatccggtgcctttgctcagactccatcagcgaccctcgcaccgccgcctccgccacctcctgcgacgccagccgtcgtcgtcaagcgagcgccgttgacccaggaaccagcaaagcggcgcgtcagtctcccggtcccgaaggtcgtagcgcccgccggccgagtcgtcagcccagccgaagctgtcgacgacgtactattgcggggaatgcccgaagacgttcgacggctccaagaagctaggcctgtaccggcgtcttgctcactgaaagatcgcttacatccagttgtacggcaaaggtaggtcgagtcgagcgtcaaaaacgtctgcctcggctgacgtctgcttcactgggcccgtttgaccttcccagtctacgggatcacccggttcacctctggcaggttgggttgcgctgcgggccacgtcgtaggcaccgacccgtaccagatctcgaagcatgcccgcaactgcgcgtctctccccgccgtctcctcgctacatactcctcggcctggatcgttgtcccgggcaagtttcaagttgatggcaagctcgtgcagccttgcgcgggcacccgcacgggcaacgctcgtcggaacaaaggtccgccctggcattcgactctgcgtagatcagtcgcttactgcggctgtttcgcaactagaggtgcgtgaggcgaaggccaaggagcaggtatcgtcgacggtcgccggctcagcgagctcgaccgctgccgccggcaaggccactgcgtctgtctgcgggttggccacgcggtcgctcccagttgcccaggcaagtctgggccgctctgcgtcatcggctgccaccgagctgacatgagtgcctcccacgctgcaggacgacatggccaagtacctcgtcgacgatgacgaagacctcagtgcggtcggcgagtcgcccgaggacgaagccgaggccgatggcttcgacgacgagagcgcagccgaggacgaactaccgtcgctgccggtctcgatcgagtctgtgccgctggcgacagagattaacaccgccgccactgactacaagctcaacaactctttcggctcggtcgccacctccgaggtcttactccctcccatcccgcgtctgaagcgcaaaccggacgacagctccgagtcgccgtcgccgtcgtacgaggccgcgcctgccgccaccatcccggtcgcaccacccgccgcggcggctggacgcctcaggagtgggtgccgcgcccgacgcagtcaacggcgccggccccagtgcgctcgacctcacgtttttccgactccgccacggtcgcccctaagccgtcggtcgcgacctcggcagcgctcatctcgaacgcccgtcctccgacgcctgcaccgcccgcgccggctgggaccgaacggctgcctccgcccttgagccgctcgcgctcggcatcggtctgggctgacgagtccggcgaccggcgggcgaccgactcgtgagacacggcaagatggaacgatgtcacgagcctgccctcggcatcggcggccgacaagcccgactcggccagtctgtccttcgtgcacaagcggccgcggctctctgacgattacgagcgccgctcagacttccaggacgaggacgaccgccgccgctatggctcctcggcttatgaccggcgctccgactggtcaaacccgtacaagcgagacgaccggcgcttgtacactacttgggcttcccggggcattgccattactcctgccgatgtatctcatgcgcatgtctcttctccttcataacgacatgtcagcgggcgtggcgagcctctctgtatgaagatctgctgaagttctcgcctgcaagtgtcatatctcgcaaaaattcccctcctccccggctgaacatccccgctcgtccgccttcttccccaccgtcagttctcacattctcgacccctcgcactccgcccgttccgaccgtcccactgcagatggaatggaaggaggctccagtcagtatgcgctcggacgacagacaactcggccgcagatgacaaaccttggagaccgcgatcaagctcgacgacgaggacccttccactggcgctcgcggacgaccttctgaagaggcgtctcgttgcgccggcgccggaggctgcagccgggcgacaagtccgcttcggcagggcacgaggagccgagcgagagcgtggctccggtgagaataccgtcctgagcgtagatgcaggtgttggtgacaacggcctcctgtgattgggttgaggggagaagtcagcgtttgagtgtggaaagcaaagaggacgaagggcacgcacgattgcttcgtcaaagaacgtgtacgagcagatcgtttcgccgccgggcacagactgaaccccgcccgagctgacggcgacgacgagcaggccgttgaggagcgagacgttgaggttgggacaaagcctgatgcaggttccgatggacggctcgaagcgcttggcttgctcgacggcggtcgagccttggtggttctcggcgaggacgaagcagccggtgagagcgacgacgacggcgggaagaagccagagctgggcgagcatcttgaaaggagtgtagtgacaaaagaatgtggtaatgaacgagtgtcgtgtagaggacgatgcttacaggcggccagagaggaagaaggtggttggagggcagcgacttgttgtcgtccgcctgcccacctttttgtagacgcgctggaggggcgctgttcgcgtgttaccgtcgccagagcctatgcgagcgaagtcaggtcgagagttggagatgctccgagatcgaccgagcgtcggaatcagccgaggtggcgcgcgtcaacactcagacggtcgcgtcgcgcagggaaagcaggcgcgtgagagcgggaagcctgctggtcaacatgaaaacgtcttctattttcagtaggttgggctcggccgacgcccgccccgaaggttaacgacaggttgcgggctgtagtcgtcgcgcctcctcggctgtggcgagggcgacctcgactgcgggccgtgccgccgcccgccaccccagccgctgctatctctgccagtagcaggccgctcgttccagccacccgaacgctcaccccagccgtccgagcgctcagccggcggagcgccgaagccaccccttggaggagcggcattgaaggcgtcgcggggggtcgactggccagctcgactcaggccaccgccgcctccgccaccacggtcgtcccagcctccgctcgctgacgcaggagctcgaggctcaccgccctggtgaccgaagtcggctcggtttccgaagccgcccctagtgcccgggccgaagccgactcgctcaggcccgtgtccgttctcgaagccgccgcgaccgccgaagcctcctcggcctgggccgccacggccaccgcggaagccaccgcgcgcccagcttccttccggtgcgccaccctcgggtagaccggctggaggtagaggaccgttgttaccccagcctctagcgggaccagctggggaaggctgggcgaaaggtgcggctgccgatgcgacgactgcagcgccagcaggctggtgcggggcaggcaagccatggatggcgagcaagaggtaggtcccgggcgtgaaaagctgctctctcagcgttctgaaagcccaggcgagccggaagtcagcgctcggaagtgactggcgcaggctgagggactgacttgtgggctggagaactggcctcgctgtctctcagcgacttgagggcgacgacctctagatccttttgcttgaaggtgcccatccggccatcaaaccagaccatcctgcgtgcgagcgagcgatcagcccttgctccgaaagctcgagcgagccggaggcttaggcgcacctgaaggcgaacttggccgcggacgacgtgagccgcaacggcaggcttgcgagcagcatcttgctgatctattgaaatcgatcgagagtaagatcaaccgtcagccactgctgctgttgtccgacgagctgcagagggacggacgtcggccagcgtgctgtcctcccaggcatagagcgagtactcggcctcggccggcggtcgtccatcggcgaagagcgtgagcgggtagaagacgatcggctgaacaaaacaaggcaccaggaagggcaccgtcgtcgagctcgccggcgacgagctgtcgtccatgtccatcatcgaaggcgaagggcgagggaaaggcagtggtggttgggtggctcagaggtcaggtcggcacgttcagcctcaagtcagcctgcctgccaacctccatcttgccctcgacccttgatcccgcctgcagcaagccagctcgtcaagacagcgctgctcggcaagtctcctacatgtacgatccgctcgcgccgtcgtcgggccagcagccgtcgtcgccggcctggccggcctcgccgcacgatccgtcggacctgccgccccatctctcgccgagcacgccctcgagctccgtctttcgccagcagcaggcccgccagacgccgctcatcaagcccgaggagatcccgcgtactgttcgtaccagcaaggcgtctggatgaggcttgcaagtccgggatggatcgaggctgacgctggtctgtccctccatcgtgcctccttcgggcacagcaggtctacggccagccgcagccttccctcatgtcgccctcggcgctgcactcgaccaacccgcccaacctccctcccttcctccgcgtcaagatcgtgaccatggagcgcaaccgcaaggacctgctcgtccgctttgacgcttcggtgcgtcctgttgtcgacgcctaatgcgagcccgttcgagccaggcacgccgacaggcaggttgatgcgatctccctccttctcccggccgctctcacttctcaacagacaaatatccagcatttccagcggccgctgtatcgcaacatgcagcggagctacgtcgagttcaggctcttgtcggatcagctgaccgtcggcaacccgcaaagtacgtatcgtcagcgtcctcgtccctttgtgcgactgcggcctcaagctgacgaccgtccatcatgcgacactcttctgatcagctatcgtggccgccttgcctttgccaacgagctcggcagtgacggatgaggaaggtgcggcgccttctgagatgagaactggcccggagcgccagactgacgcgctgctccagacgaccggctcgtgcggatcgccctccagcgctggttcacgcgcctctgcgaggaccctgtccttatgatcgacgacgagctgcggtccttcatcgaatcggatttcggcgtgcgtcctcagctccctgtgcgagtctcacctttgaggagcggcccctgacctccctttcggcgcgcgcagtacaaccccatcccgcggccgcgcaagaaggccgcgtcgtcgtcgtcgttccccgtcggcctgccactctttggcaagggcatccaggacgacgacgagttcctttcgtcggccaaagtcgagatcagccggctcgacgcgcagtacgccgagtcgtccaaggcggccgacaagctgtcgaaggcccgcaagagcctcgcagcgagcgaagtcgactttggcaccaagctcgtcaacggcgcgacgaccgagctcgtccccccactcggcctcgcgctccgcaagttgggccggacattcgatgtcatcgccggcatccagcatgcgcagagcgttaacgagagcgtgctgattggcgacagcctcggctatcagtcgctcaacgcccgatccgcgaaggaggcactcaaccagcggctcacgatccttgaagagttccaggcagccgagaagatcaccatcaccaagcgccgggccgtcgagcggatgaaggccagctcgagcatcgtgccaagcaaagtcgacgacgcgattgacgacatggaggaggtgcgcctgctcgggtgctctcattcgctcatccagagccgtcgctgaccctgtgttcgatacctggccaggctcaagcggcagaagagatcctttcgacgcggctcgcaaacgtctcagacaacctccaaaagtcgctccggactcactcgcgtcaggcacacgaggaccttgccgtcgcgctgctcgagaacgctcggctcaacatcggctacgagcgtgctgtcctgcgcgagctcgagagcctgcgcggcgacatcaagaacgtcaacaacctcggcccgagacggcggaccggtgcgccggtcgagtctgccgtcgcagctggcaaacggcccgagctgctgcagggcgagaccgagactcggcgtcagcaggcgatgccgccgacgcggacgtgggtcgagcaaccgagggctcagccgccgctccagcagtaccagcagggcccgccaccaccgatacagcgctcgccgtcgtccttccagcgtgggtctggcgtcccgccgtcgcagcagcagcagcagcagcaccggcagcaatacggcaatacaatctatccgaaccccatcggcttcgcgccttcgccggagcagcagcgctttgttccgcggcagcccccgcagcagcaccaacagcagtacccgcggctgtcttcgcagcagcaacagtacggtggtccgtctaccagcggcgagtaccgctcgagcgacgagagccgccgatccgagtcgccctctcaggccggaccgagcaattacggccggcgcgacgtctcccagtcgatgtaccagccatcatccccggcgagcggcttcggcgctcggccaccctctggtcacccgaaccagcaagccggtccaccgcctaacggtggcgcgttcgaccctctcggcggtctctctggcggaggcagcggaggcggccagtatcccgagcagatcagccgcggcaccggcgggcccggcctcacgcagagcttctatcagccgccgatgcagggcccgatctacccgcagcagcagcagcgacgacggcttgaccctcgcgaggcagcgagcaagctcggcaagggcttttaacccatcgacgggtaaggtcgcgctcgatgtgatgcggtttccgcagcgaggtccttctgtcgcgaggcgcgagcggagctggcagacatgttcatctcggcgacacccttaggcatcccacgcgtcgagctcacgtgatagcatacgcggtcgacagcgctctcgatcatggccgtccagagagcaaccgtctcgaggaggtccgggcccgtctcgcctgcgagggtcaccggcgggttgtcgcggacgacgtgagagatggcggaggggtgggacctacaaatgcaagcccacgagtcagccagccagctggaagactccagactgcacaaaggactgctgacctctcaccagggtgcgcgatggcgaattcgaccgccgacctgaggagaccaaagctgcaggcgcgggcgcggaaaaggcagcagttgagaatttcgaccgacgggaaaggaatgtcaccaaccgagtgggaaggaaagtagacgtagatgccagccgtcaccatggtaaagctctcgactatatcgccctgatcgagcgcggtcgggatgtcgccggtgatgagctgtgggagcggtcagacgtcagtctctgttgcacctggtttcgaccatcctagcccggaggacgaacccagagacggaattggcacgccgtccgcgaccaagcgccgacgaagccgtcggctgtcctgaagtcacgtagcgaattggtgatctgccgtacctctgccacggcgacggatgtcaggcatgtgcccgaaagcttaagaaagacgcgcagcgcggcttcgagtagccgccgggcgtcgttgagcttgtagaactgccggttgggccagttggtaccggcttcgagctgggtcgcgaacctggcgtccaatttgaggctggacagacggcgaaaagagcagtcagctcgcgcctcaatgaaaggggtgcgtcagagcgtccgcctggccgcgtgtctgcgagaacagggttgactcagcgcgcaggaccatcgagagcgcgtcgatctcgttgatcgccttgaccgggacatcagggtcggtgcaagaggcttctcgctctggatcggcagcttcttcttcactcgcggcttgccggaagcgtcaggccgggtcgccttcatctgcttgaggccgaacgagctcgagccggccttcgccgccacgctctcctgcggccggcccttgatgcgttttaaagctgctgccggattaatcttcctgccgaccatgccctgcgttagagagacagggtcagtctcggtgactgaaggcagacggcgagcgatgcaagcgcgcgacagctcgcgatcagcagaagacgatggacccactggcttgagcgagggcttggccgacttgtctgtcgagcccgacgccggagccggtggaggaggtgtcgagtccatattaagacggctgttcagtaggctgggctggcgagaggtggtcttcgggagggagaggaggcagagaagtgctcgggtgaaagacggctgctgcgcggatcaccctcggccgatacgaatgaaagggggtcggtccacctgcaactttcactctttgaaaggtcgcctgtgcaagctgagagggtcgattcatctcaacgccatgcgagaggcagcaaacggttcagtcacctgccagacgcttcgcatcctcggcgcaagccccgcccacttgcgcaaggcatcggccatggtcgcctcgtccgggctctgtagtgtcaccggcggaaggccgaggacgcgagcgctgattcttgacggtagcggacacccgagagggccgcgcagatcggtctggtagacgagggcagagagagcggcctccttgttgagctcgaagccgacggcgcgaaggatctgcgcctcgagctcggcttagccgtcatgggcgagcggaaagcagcgatcgataatggcggtcgctgaagccacgtccgatggagcgcggtaaaggctgcacttgagggtctgcgacagaatgcgacaagaaggttcagcttgtcgaggagcagagcgactagaagccgatcacgcacccagaggaagcaatcgttcgtgacgccttcacccggtcgatcatcccttgtcatcccttgaagcgagtcgagcatgcggagccgcttggctacgtcgagccgccattcggtcacgacggtgcgtgcgagcttggtgcggcgtcgttagctgccgtcggtggtcggctgatcaaggcctgcgcaggcaggtcagccccgtgccggccagagcctcagccatgacggaggaagcgagcgaaacgtttggagggggatcgaaggtcaagacgttgagatgaaactcgccggccggcgggagtgagcacagctcgtggtcataccgatcagggcgaacctcgcgggatgacgacgttgaggacggccgccgcctcttactcgacccgagagtcagcgtagggcggcctggctggtcaaaatgcaaagaacatcagcatttgccctgcacagaagcgtcgttgaggacgacaactcaccggcttcaaagtcgagcagctcagatgcgtcgaagtcggtgcagtcgacgcaccacccggccaaggctcttgaattgcgggtcgcgaaaggcgccgttcgaatgaagccgctgagaccggacgctgagaccggacgctgagaccggccgatgagtcgggaggcgaaggcaagccatagcctccgagtgccaagagcgaatccgagggctgagggaaggcaggaggcggagaggccatccaccaaatttgctgggaggatgcgccgtaggcgtctccgatgaagctgatgtcagatgagcgtgggtcagcctctgctcctggtcttggcgacaaaggaacgagaacgcaccactcgtaggcgtctggaggcggctgccagcgccgctggtcgagtccgatctggtagaagagatacaaagcgccgctcctgccgttgggcatcatgaagtccgtcggcgagagcggcctcggcgcgtaacagcggccgtcaccgtcgcagccatggcaaagtgttccgccgaagagatgagccgcgctgttggacaaagtcgtcagagcagctcttgggcctgagcgggggaagtcagcagagatgtacgtgaggttgatatcttgctcgaagttcggatgctgaatcggctgatgctggttcgagatgggaagtaaggctggagggtacgttgcgagatgctgaggggcggccgcttaaggaaggccgagacttgaactacctgagtctttcgatgctgactgcgagacgccaaacgaggcaggtgctgatcggcagacccagggatgatgaggaagcggcattgagcttggtcgcagcgacgctgaatgatacgaacgcaacgggcgctgcgtcagaacgagcctgcaagatgtacaaacagtcgcactttcgcacctttcggccttggcctcagccttggcccgagcccggcgttgtctccgcactgcgtcatgctctctgcaggacgtgcacgttagagtcgggctgccgtcgacctttgagacgaagtctgcggccgtcaacgtttggctgcggactcggcacttcttgcggcaagtgccgtggcagatgcggatgatactggttgaagggctgtggagacatcaaagcaagcggcgcaaggctcagtggcgtgtgagtgtcggcgagcgacgaccagtttactcacagggagggcggtgggcttgtcgagacgaatggcggggtcggagtcggctgctacgcgaccagaccgccagacgaagcagccagtgcaggatgccaaacgtactaggcaagtgcacgcagggcgacaggggccatctagagggccgctcagccgccaccgccgttgccttcctcgactcttccgcatcgagcgacagatacgcgctcagagcttgtccacgggaatacaagtccatgccgagccccacgaccgcgtccagcctagatggcgccagagagcctgcgatggcaggttgtcgtccgcgacatggcagtgggcgcggatgccggcctcgcgcatcgctcgcagccgatcgcggattacgagctgggcgagaccacggcggcgggataaaggctgtgtgtgaagagtaccgagtgagtagtccgagtggctgagtatccaggcctgcgccgttcctgtcggatcctcggcgagggacgaaaacggaagcagcgctttcacgtaggcctcaggtcggcggatttcggacgtctcgcaaatctacttcagagggtcagcactgacaactctacacgcaggacgagaagcgacgcaccgccttgacatcccggagcttggccttccgcaacacccaacccgccggcaccttgagctcggcctcgtcctcatcctcttccggcgcgagccagacgccgtagatgtggacacctccgcttaagccaagccgctcgatccagagctcgctcagcgcaccgatccagacgtcgcctgtcgccgctgagcagaattcgcggaggcaagcccggaactggccgtcagcctcggccagctcgtcctccgaaggctgagcgccggtcgcgagggtcgcctcgactgaagtgaacgcccggagctggttcgtcgacggcggcagctggtgaatgagcaccgtccagacggtcggcacaggcgagcctggcgggaacgaagcaaaggcaaacggctcggatggcggcgttggcagcgagctgtgccagagcagggcgccgaaagcagggagcgaccgaggcaagtgagcgcggagcagcggcagcaacgtcgtctctggccgcggatgagggtgaagcatcgagaccttcgcgagcgagagccgcagcttcctccaggtgccgacgtggctggacgaggattgagttgggcgaaggaggctggcggtaggaggcaaagggaggctgtcgagcgagctccatctcgcgccgcgcttctccgggcacgggcgcagcatacgtcgcagcggtcgacgctacgtcctgggccgaaaaagtacaagcatggccatgagatgcgagcataggaccgaatacaagagagcaagagcgagagagacatgcgacgaggcgagacgtgacgagggggcgggcgggtcgtgaggctggggcgataggctggttaccactgcctgccctggtgatgcggctggggtcggctgaactcgagaccagccgggaagagcagctctgggccgtcgcggcggaaaggcatctgcgcctgcatctgcggctggtgaggcggcggcatcggaagggcctggcgcgggccgacgtgcggctgaacggggcgtggcggctcggcgactggaccgtcgagaaggaccgtcggctgaagctcgtagctgcggtagagggttggagagttagcactgatggtactgggtcgatgggcagggacaagaacgaacatggtctgtggcgtgcccttctcgccaggcgtcttctcgccgtccatgacgctgcgtcgacggtgtcagcatgcgctcctcttcttcgccagaaggcaaagctgcctcagacgcacacgtggatacgagcctccatcgtcgcgctctcggcgccgtagccttgcgggccgggtgtcgggccatcgtcgctgttggccccgctgccatcccaggtgcagcgggcgtcggcgccagtaatgatctggagcagcttgccggtgtggatgtgccggatctcgataaagttccacgagaagaggagaaaccaaggcgggtgaaaagcgaccgtcttaggaatcgtctcccactcgatcgttctgtggccgcgcgctggctcgccgtgcttttcgacgtagaagccgaaagctggaagaaagaagggaagaccaattagctcccgacagtgacgcggtgaaaagcagggagcggattaactgttgtagcagagcagaaactcggtctagtgtggacggcctgaggcgtcagcgaaatcgcatgccgtcggtcgcagctgccaagacgcacgtcggttgaccggtacatgccgagtggcgtcgctgactcgacacgcttagctagtgcggccagcgcagggttctccttcatcttcggcgagagaaagatcgggatcgttccgccttgaaggctggcgagtgcagcggggaagatcaaacaggttagtcatcgccattgcgcagccagactgcccatgcaactcacttctgcaggtccatgatctcgaagcccttcgtgcagacgatggcgagcttggccttaaggaagagcacgtgcttcgcctcggacgggatgaagaagtcctgtgggcgggcaggggggcaatggggctgtcagcggcgggaactaagtgggccgacggcgagccgatgacaacccaccttgtggacgcggaagctcgtgccgctcggccgggtgccaaagaagccgcgccggccgtggtcgccccgggcctcgggatagattggctcgaggatgcgaaagaccgagtcgagctgagcacgggcgggcaaggattagcgacaagtttagagaggcagagttcacaacacgaggaggtagtcacctgcttgcgcttgcagtacctgagatcacgaaaggagtaggtcagctctgatccgacaggttgttccctcgagacggcgctacgacgcacgcgacaagagttcggccagatagctgaccgacgctgaagaagaggacgtgagccgtcccgctcagccgttcgggaccacgcgagccgctcgacgcctgggaggccgaggaagggacgagggcatcgagctggtaggcgaagagcgagtgttcggcgagcacaaggaagatcgagaactgctcgaggcacgcaatctgcgtcacgttcttgactgttcgtgttgaggagaggttcagcgcgggcgtcgagtgcgagggtcgataagaggaacgccgactgaccgtgcagcactttgctgaatgacgcgagattgttgcgcatgccgatccagacaccctcctcgcagccgatggcaacgaggctccggcggtcgcgcgtacctgatgcgagcaaagtctagagggtcagctgtgaagaaggagtgtctggcgaacgaaacgtacagaaaggcaccgagcaggtaacctggccagagaacgggctcggctcggcggcggtgcgcgagttggtcggcggcggagcgtacgtgtggctcttggtcagcgtccccttggagagctcgccgagctcaaagactttgttgccatcggcgacgacgtcgctcagcgttttggcctcttggagcttctcgcgccactcagtccgagtggcctcagtctcggcccaaaggacgtacgtcccgcccattgcgccgctgctgcggacaacgtagctgaacggatagacggtcttcgaagcctcctgctgctcgggcgttgccgtctgctcgttcttgtcgcgccggctgatgaggccgcctgtcagtccagttgacttgatggtgctgccggaaaaatcgccgaggtcgacaaggctgagtgggatgggctgagagcggatgatcgcgtcagcttcacctcactgtggccgggtgtgcgcgccaagaacgtacccgcttctgcagcacgtgcttttgctggccctcatcctttttgccctcgcgaggccgcataagtcgtgtagtgagcactgcaataggccaaggacgcatcagcgacgtgcgagggacgatgtcaagctttcgcagcaactgacgatagttgtcgagcaagatgaggtggacctggacgccgtctggttgccgcacgaactgacgaaggtgcgcatccgggtcaattcgcactcgtgagaggaaggccaacaggaggggcgaggacgcacgcccttgtgaatgagctgccgctgaggggccatcatctcgagatcggtgatctgtttcgatggcgcaggaggggtgtcagctgctcgtcgaaccggcatcgacctcagcagaagggtagacgtacgactgagctgctgagcttcgagtcggtcgatacagtcaggacgtccttcagatgccaaagctcgaccttccactgggcgtcttcgaccgccttgtcgacgatggccgccgagcgctgaagctcgtcgagaacctgctggacctcgtcggtgtcgagaccctcgcgcgagctcatcttgtggatctccttgagcaggagatcgtagcggagcagacgaggaatcggccggttgatgaagtcgtagaggtcgcgacggtaggccgccggcatccgcgtgcagcgctgtccaagcaagctttttcgtcagccgtcagctctaagtccagcagaaattgtgcactcacgtcaaagaactcctggaaggccttgttggtccgccgctcgcggtcgatccgccattttgcgatcgggtagttggccgcgtagacgcggtacgcctcggcccattgaagcagggcatcgaaaatgaggtcattgaccgagttcacgacggggtgctggtcgcgttggcgacgcgtcaggcggatgagaagctcgcggtggatgtcgagtaggtcggcgtctgtaacaggacgatgaaggcgatcagctggcggcactgactttccggccgtcactagttacgcacagttgtggaagacatcccaaataaatttatcgatgccgtcgcgagcgatgatggccggcgaagcgttccgcagcgggcgaatgaagagctgaggaggagggcgtatcaagaggttcagcgccttgacttgcgcaagcgctgctcacgaaacaaagacaggcggaacgtaccgtctcgagcgactcgaggtcggccacatactgaatctcgcccttgatgatctcgaagatgacgctagagaagggtgaggtgcagggtcagcaagttgcacgcacatgagcaagtggatcttgaccaagacagactgctgcctcgcctgaacaggcttcggcacgttggcgaggtcctcgggccggacaaagtcgtgccactcgaggtgctcatgcggcccgcggccgttgccgccctggaagccgatcagcttaccctcgagcgcaaaattggcaatcgcatcagccgcctcggccatgatcgtccggtcaaactggtcctcgggcgtctctttgatgatggcgtcgagcagcttgctgtaccgctggagctgggcgaccggccgacctagaaagcgcttcaggtcgcggccgcgagcgtcaggcgtatgcgacgcgcgctcaatgaaggtccggagctcgggaaagcgctcggtcgcctggtcgagtgcctgctcagcatgcggcaaagacgagaggtactcggcataaagcgcgcgaaagttctgcgggatgacgaggaagacgtcgccaatcatctcgatgatcggatgctgctcgcgctgacgttcgttgaagaggtcgagcaggcgttcgttggcgagccgaagcgccgacagattcgtgaagacgtcctcgatgaacttttcgagcacctcgggcgggtgcaggattggcggccgagcggcgcgtaggggcagcacgaagagctgcgggcgagcagaacacccgatcgtcgtcagcttcggcactgatcagacgatgaagatcgcgtcgcacgcaccgtctcgagtgtcaggaggtcttcgcggtactgctcttcgcttaggaccgttgtgtggatcgcctcttgccggcggatctcggcgtcgctcaggctgacgaggatctcgggcagtacggcctcggaccaggtccgcttacgctgccgaggctcaacgtaagctgaggcgacgctctggttgcgtgagaggacagcttcctgcggggcataagaagatgaacatgagtcaagggtcgagcagacgtcggtgcggcgagaagacgtacggctttgaccttccacgggcagctggaaggacgcgcagaagggtcagccagaggtccctctcatggaaggccgctcggacgtaccccggcgcatagcattgctcgtcgccggtgcagctcgggctgtagcacttggacaaatgcgtgaggacgccggtcggcatttcagagaagcccccaccgccggcctcgctctcgtcgagaaagatgaagacgtcatcgacagcgtccgacagagggacgtcgtcaaaatcgacctcgatcaggaagagctgcgacttgagcgagcgcgcgacctcgagggcgactcgccgggccgtcggccgggcctggacgtgctcgggcagaaaggccacgagcgccgtgacgacatctttgccggtgaatgagttgtgaaatgggatgccgcccttgatgtgctctcctctggaagagggatcgaggaagctatcagctgagcatctcacggagctgggttgcaagtaagcgacgtaccgagtaaccttgtcccgaagttggacggcgatgtgactgagaagcgcaggctggaagaaacggaaaacgtcgtcgccaccgtcaccgtcgccgccgttgaactcgtcgtcgtcgacgaagcggccctgaagcgcaaggcggagcagagccttctcagccgaccgagcctgagtcgagtcggtccgagtgtgatgcccgcctccgccgctgccgttggcagggccgtgcgatgtcggaaagtagccgtttcggccggcgccgtttgccgagagctgaggagtcgacgtgcccgacggcccggcttgggcaggcgagtagtgcggcacgcccggcagcgggctcgacgggtgtcgcgcgttgaaggcgagcgaggggtagtcgaccgcttgctcggctgtcacctggcccgagccggttcgagtgcccgaagcgctctcgtacgcatccgagaaagggttgcggtcgcctgacgggtgggcgctcgcgagtggcgtgaggaggccgcccgtcatcagcccgggcgtgacagcctcgaaggacgacctcgacgtcggtgcgagcgagttgtaggctaggccctcgtaattcgcgaccgaaaccggtcggctcttgatcgacgattgagccgatgatgctggcgtaaggtcggccgagacctgctggtcgtaccggccgttgttggcgttgccgctcgcgaacggcgtcgagtagtcggtcgtgccagctcctcgaagcgtgcccgcctgcccgtcgaggtcgagtctgtgctgctgcgggggcaccgtcggccgcggtcgacgactgctcagcccagagatgtcgccaggactgctccgagcgtcggcgaacgatgcgtctaatgacgatcggagggcggctggtaagggcgtcgaaggcaaaggtggtctggacccactaccgccgacggcgttgctgctgctgcttgcttgaggcagcagctcggagcggtccgaggttgtcgaggtcgtcctctggtgctgcgcctgtggctgaggagttgatctactcagaccgagagaagcggccatccgtgccttctcctcttgtgcggtcagatacgtccccttgccaccgccggtgccattgtctggccctgcgccttgccaaccgctgccgcccgtaccggagctcgactcgaagcccgagctgacccgattggcctggatcgaaggcacagagggaagctgcctgccgcctccaccgggcactggcagcgctcggcttttattggccgccgtagttggtactggcaacgctgggagggtcgtccggccttgcgactgcggggtcggcgccgacgcctcggcaggcgtcaacgggcgctgaggctccgaagaagagcggacaacgggcgtaaaagtcgcgtcttgtggtgcagggaagaaggacgagctacacgcgtcgacaggcgtggccggtgggccgtagccatcggacagcgtgtaacgctgaagccggctcaagtcagccggccgcggtggcggtggcggtggaggcggtggcgccggaggtgttggaccggccgatgccgatgcggacgagaggactggcggggaagggtagcccgacggaccgtagccgaccggcgaggctgggtagaacggcatttggccgaatggcggcgcaccggctacgccgaagccgggcgcgcctccgaacggtggcatcatcgccggcggccaagccggataggccatcgacgccgcgggcgtcggataagggcagtaggctgctgggtaggcttgcggatgcgactgctggccgccgaaagaggaggctctggagggtgacagcggcggctggctgtaggcggcccaaggaactgaaggcatcgcgaacccgcctagtgtcgtcggcgacagcagttgatcattcggctgctgagactgactgccgaccgaccactgacgttggtgctgctgatgctgctgcgagctcgaagcaggcctgagccatcgttacaggcgagccggaggggtgtgcgtcagtcacgaagcgagctctctttcaactctgacacgacggagccaagacgtacgactgcgagcgatcgtggacagcacttggtcccactgctgagcccggcgatggcggtggcggcgggtaggcgccctcctgctgctgaggataggacattgatgggtgagttgggctcaggaagatggagggcgcgcgggcgcagcaacgacgctcgctcgcggagccgcgtgcagaggagaatcggtcggcgggcgattggcgcgatgcgaggcagtctgatactgcgttcccgctgagtggctaggtcgagagaccggcaagggattaagaatcaggccttgaggctgtcgacaggcggaggttgtcgtcagaggtcgaggacgcaagggcgacccgagggaggccggcgttgtttcgaatcccaaatcgggcgcgctcggggtctggggttttcggtcgcgcgagtgcggagagagcacaacctcagccccgactacaggcagcccggaatcgtctgctcgtctctccctcgagatgttcgccgccgtcaagaaggcgcccgtcacgctcgcggtcaagctgccgaggtcttcggtcaagccgggtgtcgtctcggcgctcggcaatgcatcctcgacggcggccgatagctggtccagctcggcagcagcgaccgcgcctgccgccgacccctcggcgaccgacgagcctgtcgcaggaccgtcctcctcgttctcggcaccgcatctatcgattccgccccatgtgtcgtcgccggtcgtgcgcaagctcgtccggccctcaaaaccggcgctgagcaaagagtcgagagcgccgccagcagcagcagcgtcgggcgacacgacgcctggcttcggctcgtccatgctcgccttgcggagtcggcgagtagactcgtcctaccttcttccgtcgctcggcgaggcttcatccgcttcagcagccgactccgacctgccgaccgacccgatagtcaaggctttcggtcagccggtcccctacccggcccagctcccgcagcacgtcctctctttcctcctctcgtacccgactgcgacgaagcaccggtattcggtcgccaacgttgacttctacaccggccgggtcggcggacccgactacgagggccggggcttcaagcgtcactggcgggcaagggagacaccgccgacgaaggacagtccgagcgggtacggcgtcagctggtgcctcgagcagctgtacaacgacccggcccggatgtttaacgagccgtgcgtatggcggcgctgcgtcagggtgcatacggtctgactgtggtcgctgactcgacctgtcgctctcttgatccggactcatgcaggcaactctggccctgttcgttcttgcgcgtgagctcgctgaggcgtgaacaccatcctgaccgcttcttccttctcgctttctagggctctttcccctccctgacccgggcgccgacaagtacgctcagccgctccaagcgcatgagatcgagccgatcctcaactcggtcaacgcggtccgccggctcgagcgcgcacatgtccttgtgcgtccctgcacttgtaacgagctgtagcggcagtgttgacttgctgtcctgcccgtcctcacagacgatgaggatgctcggcattcgagtagtagacctcggcaccggcctcttgacgccagccttcgactctgccagcctctgtgcgtggcttgtcgcggcgctcgttgaccgggctttcactgacgcttgctttcgctgcacactagtcccgctcttcaccgacccagcaacggccaagacggcctcggcgatcctgacgcgcctcttgcagtcgctcacgctgctctcccccgacgccgcctccaagtcgtccttcctccgacacgtgccttcgacgatcgggttcctcatcgcggcgcacaacgaggggctcgtggacctcgcaagagggaccgacgccggcgctgggctcgagagggaatgggggctgagtgtcatcaaccgcgagctgagggaggagctcatcgcgctcgccctcaaccggaaggaccactcgctcccttccttgaaggctcctgggagcgcacgggcctggggcttcgcagagtacgagcgctgggtcgtccgccagaacctccggcatggccggctccggcagcgcttccgtggcatcctcctcccgttgccgcctcccggcccaggccagcccaagccggtcgagagtgagcaggcaacggaggaccgctgggtcgagctcgtcctagtccacctcaagacgcaggcggaggaactcgagtacaaggacatggtccgcaagggcctgattaaggtcgagaggctgccggcatcggacgaggaagccgataacgctgcccagggcgatgagaagccgcctgtcgcccgggcatctgatgtatgatcacctgccaggacgttgatgcgatggacactgaaagcgcatgtcttgtagtgaggtcggcggacgggcgtagagagacaaggtttttcggagagacgacgacgacagggtgacaagggtggggatgatgagaacgagagaacggcgacgagagcgtaaggttgcaagcagggaagcagatgggcgagggcgagggtccagaagggcagactgatgggagaaagcttagaagacgaaagacaaagaaagacggagacgacggctcggagatcaaaagagcacggcagcggcgccgagggccgccgttagcaacgcgagagccgcgccactggccgagacgcgaccgatcgcaccattgtacgtgtatttctgctcgttgctagtcgagccgagcttgacggtccactggctgccaccgtggccgttgctagtctggaggacctcgggcgcaacgcgcgtgttggttgcgccggcgccagcagtcgacgtgtactcgacgacggctccgtcggccggcgtcgactcatcgaaagaagcgtccgttaggaagacgatcgcgaccgatggggcgaacatcttgatcgtgcacgacttggcctcaacgtcgcacggcgccgtcaggttggcccgggttcccttaagcatgccgtccgactcgaaggcaccgccgaacgactggccggcccaggtaatgttggtctgctcggcgactgagtcggcgcggaggtagcggacttgaaccgaggctgggatcgaagggaggctcgtcaagtcgagcaccatcgtcgcgtcgttggctccactcgcgtccgaggcatagttgaagaggacgacgcgcgctgcgacaccgttttcgaaaatgcagtaggccggcaggtactggtaggttgcatcgcttcctccaccggtgaggtcgacaacctgcgaagagttggacgacccgagaacttccgaaacgacgagcatgctaaagtatgagctgcccgtcgtccactggcggaagtttgtctcgttcgtctgcggtggagtgaagggctgcaagcatggcaatcgtgtcagctcagggctgaaatcgatcccaaaagcgattttacgcacgttgtagaaggccgattggccgccgacatgaagcaaggccgacgaaaagtcgcggtaggcgagcgtgagggcccagtcgatgagccacatcgcgacgccaaacgagtcgctgaggccggcaaagccagagcacgaggccgagttggtttcagacataatgacctcaagcccgcggtcggaggccgtcttggcggcggcgatgtctgcaacaggaagcgcggcgttaggtcgagcttcggtggctttaacggcgcaaaagtacggacattcggtcacgagcgaggtcgcctgcaggtgggtcaggaactgagggaaaagcgactgagctgccggccggtcggtggcggcacagttgcttgtcgcatacttttgaaacgagagggcgttcatccggccagcgtagatatcgagtacgccgctctccaacatctgatccggtgtccatgagctgtgggagatagagcgcggtcagcgaggagcagcagtgcacgagaagcagcagcagctgctcaccagcagacgctcggcagcatgaagttgttcatcggcagactcgcatccgaggccatgttgttcatcgccgtcgtcagctgcgactcgaacgtcgagatattccaggtgcccgtccggcggcccgccgagtacgagtagagatcgggctcgttgcccatctggacgccgtgcaggaagccgcgcgagccgaggatctcctgcgagagccggtaggcctccctcgctttgctctggtcgtttggatcagcgaagtccagtcccatcacccattgggcgccgacgaggtccgagatattgcccatcgcgtacctgcgtcgtcataaaatggagtcagttaagacttcgagtgcggctggcgacaggaacgcacaggagatcgaccgagtagtcgacctgaggcgtcaccgactccgagtcgtccgccgtcttctcaatcaggccgccgctctcgaggccttgcgggaagacctgactcgcctcttgcgagttgccgccgacccgaataagtggcccgactcctgcccgcgcttccaaggctgccatgtagttgaggaagggagcggcgagcgagtcggaactcgtgccgaggatgcggttgacaaccgagagctcaatcgagaggccaaagaagttaccccgctgcggcctcgagaccagcaggccggtcgtcgccgagttggcattgacctcgtcagtgcttgctgggacgccaaagtaccaggcctcgccgttgcctcccggacccgagcccagtgccggtgacggcggtgcgggtgcggtcagccgcgtgctgtcggccggcgtcgttgggatgggagccggcaccgagctcgcaccaggctggcctggcagggtcgtgtaaagccgaaagggacctgctgatgacgaagccggtgcgagcaggagaagggcggcgacgagagggagaagcttcgacgacgacatgttgagggagctcggcgggcggtgacgagtgcggaagtagaacgggaggaagtcgctcaaagctatatcgttgcgacgtctggaacagctagtcgagcccgtcagcttctctctgccagccagttcaaggtgcaggaagcatgctcacctatcggttccgctcacgagagggccggggttcgctaagcgggaggcgttttgcgggggtgaggttggtctgcggttgcctggcaggagcgctcgagccggtcgagctggtccgcttttttctggtatcgtaggctcgggtccagcgagcgagacaacaggaaaagagaaggtcgagcggaaaggtcggcaggaccggtgctgctcgagagcgagcaagagctttctcggtcgcctctccctcgctcggagggagcaagccgacgccgcgcagcaactcttcgcccgagggccgcacccagaagaagattggtcccgtcctcctcctgcacgtgcgtctgaaagatctgtacaggtcgggttctaatagaaaagaggcgaggcagaaagcgatacagtcgagatgcaaggaaagaggaatagtgtagaagttgcggaaggtgcgagcagggtcggtcacgatgacggtttgggggcaaagatggtcggtcaaaagtcaggtcacatacgggcagccttcagcttgtcgtcgagcccatcgagatcgtcgctagagtggacgagcagggttggaggcgtcagctcgagcgcagggtccgtttagcccaaaccgggacgcaccgcttgccgtgctgcttcctcggccggcgaataacggtgtcttcctcgtcggccgtcgcatacgcgtccgagtcatccgtgtccatgtagccgtcgtcgccgtcgaaggaagtccgggtcgagcgctcggcgctgacgatgccggcctgcttgaacgactgcgtcgcccggaccttctgcggacggccagagacgcagggagtaggggaagcggtcagcggcgaggaggcatggcaaagttttgataagacgcacggtgatggcactgttccagcgcccccgggcagagaagttctcgcgcaggccctctccgatgtcgtggtcctcggccgagtgcgacgtcagccactggtcgacaggcaagcggcggtcgagcgaacttgtcagcatgacgggcgcgtttcgcttatgtgtctgggctactgcgagagcgacgcacgggatgctgaatggcctcgcgcgcagttggccgcttggccgggtcaacgttcagcagcagcttgatgaacgccttcgactcctccgaaggttctgcacgttagatcgagagcgaggtcagccagcgtgagcgatgcgagggtgcttgcgccggggacgcactcttccagtatcgctcatggaattctatccggccgcggatcgtctcgtccatgagctcctgtgcgtcatcgctccggaagggcgagtagccacttagcaggacgtaggtgatgatgctgaggcgcgcgttggttcaaaggtcagctcgaccaacatcgcggcgatagaggtgcatgcgcttgaacgcacccgagcgaccagaggtcgaccggcttgccgtggccagcgttggttaggacctccggggcggcgtagccgatggatccagcggcctggcggtggtcgggggggtagatgcgaggtcagcggatgtcatctagagtcggagggatttaggtcgagacgaacggcatgcaggacctggtctgggctgtcgaggtgcttcgcactgtaaggccgggccagctcgtgtcagtggcaggcccaggccatttaaagatctcgatgatcagacgcacatgccaaagtcggccaagacgatcttcgagtgctcctcgcggttgtggctacaatcgggagggtgcgcatcagcgatgctgtgggagagaaggtcgaagagctcgagaggccgcactagaggatgttctccggctttaaatcccgatggacaatgtcgttgtcatgcaggtagcagacggcgtcgagaatcgacctaggaagcacgacaagggccgaacgtcagtaacggctcgacaagccgcgctgctgaaggcagtgagcgacgcaccgcacgacatcctgggcgtccttctccgagaacttgcccttcttggtgatgcggccaaagagctcgccgcctgccgaccacatccgatgccaaaagccggccgtcagcgttcgtgtcggcgtggcattaatggtcgctcgacgacgcaccggtcgcaaggtcaaagacgaggtaccacttgtcgcgcgattcgaaccactcgtagagcttgacgatgttctcgtgctcgagcccacgcaggacactcagctcgttcatgacgtcctgctccttgcccttgatcgccttttttagcatgatcttgacgctatcagggagcagcaggcttaggcgagtcagtctgacgaagttcgggttcggccagggcggcgacagggacgaacgcgacatcgcgctcggggttgccgggcggcggagcggccttccaggtagcatggacgacgcggccaaaggttctgcagacggaaaagaggcagagcgggagaagagtgtagatggtgagttactgtcgcgtcccaaacagtgccggatctcgagctcataaggcagcgcaccctcgaccgaggtcctgcaggacaagatgaagggtcagccattgaacgacgagcggcgagacgagacgacggcgacgtacctccttgaacttgtagttctttttcttgcggtagctctccggctacaagattaggtgacgagcgtcagctcgcgagcacaggataaagaggagattgacgatcgttgagtcgtcgacgacgttgctcgactccgacgagcggctgccgctccggtctcctggcaccgccggcctaactctctgaacagtagccagcatccagacagcagggaggacggacctgcgagaggaaggcttctttgagacccatgatgagggtgcgagtataggcagatgaggaaagatcgagggtcgaggtcgaggaacaaggaggacagaggcgggctttgcagctgcttgggccgtcgtcggcgcgcaggcggaagcaggccgcatgcagaccggcggcagtgtcggtccgccaaggccctttcccttgccgcttggcccatgacaacctctcgggtgacgagggtcgaaggtagaagctgtacgctcacggacggtcatctttgcacaggagagagagcgggcgaggccgagtcaacgtatcggctgccgttgtcgtgctgcgctgcatccgagactggccgtctgccacgctgaagctagcctcgagtagcgacgaggaggaggaggagggtgcctcacaactccagctcaacctcggagctcgaggacttccataagtcgaccgacatggccgccagttctgctcgtcatgcctgcgatgctggagaaagacgtcagccatgggcacaggaaggaggctgtcaccgccccgactcgttctcgcgcgcaggccgcttcgacgccttcgcccttgccctgcactcctccgaccagcatctacatttctcccgccgccgtttctcgcccatacttgactctctttcccggcagccatggcgtatcatgatcaggtccagcggaccgccttcacctcgcataaccagcagttgtccgtcccctccttctcgtcgcctcaccgctcggcccatggtcggctgcggcggagagcaagtgtcttcgtcccgcttcctactgacatgctcgggtgccggtcactctgcagcatcatcgactcgagctatacgatggtcaaggagctcgggtacgtcgtgtcttcgtcaacgtgacgccagccgaacgcgagatctcgagcgaacggcagcggtcggagctccccgccagcaccggctcccaaatctgacgctgcccatctcccgcctatctcggcacggcaccaggagtggcgcctacggctgtgtcatcagcgcaaagcacattggcacggacgagatgtgagtttgacgccttgtcttggttgtacactccaaggcagagctccggggctgacctgcttccgacccttcgctcgcgcgcgatcgtcactcgcccgaccgaaccaggtgcgcgatcaagaaggtgcggaccgttcatatcgaccgctgagggaacaccgcggctgacctgctgctgctcgcacgctcacctcccatcgctcagatcacaaacatcttctctaagaagatcctgtcgaagcggtgtctgcgcgagatcaagctcctgcaccacttccgcgggcacaagaacgtccgtctccgctttcgagctctatcccttgcgctatttcggtaatgtggctccggctgacgtcgtactctctgcgcttgacccgctcggcagatcacttgcctctatgacctcgacctcatccaggacccgcgaacgggcgcgttcaacgaagtctacctgtacgaggagctgatggaggccgacctgcatgcgatcgtccgtgccatgtctccttgatctgtcgctcgggcttgcgactgacgactgtctctcgctcaacaggtccgctcgggccagccgctgagcgacgcccacttccaatcgttcatctaccaaacgctgtgcggcctcaagtacatccactcggcgaacgttcttcatcgggatctcaagcccggttcgtcgtgacctttcccttcagcactgccggtaagcccctgctgacggaatcgacgcccaggcaaccttctcgtcaacgccgactgcgagctcaaaatctgtgactttggcctcgcccgcggctttgcggcgaatggtaacgaggagaagggcggtccgggcatcatgaccgagtgtgcgtccctcgtgcgggcgccttgcggttggcattgcctagctgaccacgactgctggtctcgcagacgtcgcgacgaggtggtaccgcgcacccgaaatcatgctctcgttcgccaactacacagcagccagtgcgtctcatctcttgcacttgctttgatcaacgaagtgatagagctgaccttgtatctgcagttgacatgtggtcggtcggctgcatcctggccgagctgctcggcggaaagcccatcttcaagggccgcgattatgtcgaccagctcaaccagatcctccactttcttggcacgccctcggaggacacgctccggcgcgtcggctcgccccgcgcgcaagagtacatccgctcgctcccgataaagccgaggatcccgttcgccaacctttacccgaaggcgaaccctcaggcgctcgaccttctcgcgaggctgctgacgtttgacccttcgaagcggatcacgtgcgaggaggcactcaatcacccctacctctctgtctggcatgacccgagtgcgtctcatgacggcaaacgcttcacgatcggctcaccccgctgacggctcaaccgtccaacagacgacgagccggtgtgccagtacgacgtcgacttcagcttcgaggacgaggattcaaccgacggcatgaaggcgctcatcctcgacgaggtccacctcttccgggaagaggtccgcaaccaggcccgcggctgggaggccccgcgcgggagccagcagtgcgtgccgttcgcctcgggcctttcgtcagctctcggctgttctgacctgctcaccgccgtccccttttacaggttgccgctcgacgcggcggggtccgacaacgtcggcccgacgtacggcatgggcgaggccgacggcgcaggcgccgtgcccgagggcgagtttgccggcctcgacccggcccatgagtttgagcgctcgatcccgcgctaccagtgagggagccagctcggttgatctctgatatgtatctgtagctggcggctgtgggcaggaagcaagcaagggctggaggaacattagcgcagcagcacaagggctcggtaggcggcgcggcggagaagccggcccgctctagggaacgaacgaccttaagcgggagggcccccttccctccgacgccatcccatcttcccttgccacgtcggatggagaaccatcaggagctgaaggagcaacctccgcctccgccgccgacgacgccagccgatccgcctgctgctgccgacgctggttcaagctcgctcgagttcgtcagtagagtggaggcttctcgtccgtttacggcggctgacctgcctgcgtgccgcacttggcacttcactcaggtacctccgagcagcgggacgccagtcaaacgaggcggaggtaagaagccgaggccgttcacgtcttgcatgtagggctcgctttgagactacccatccagttcggcgatgatagggaaggtcgacaggcgctgacaatcttcccgcgtgttcgcctgctcgcctcagctcgtgtcgccggcgcaagatccgatgccttaacgagaacatcccttgcaagccctgcctcgagtacggcgaggtgtgcgtgctgcttttgccactgcggtcgtctggctgtggctcggctgacctgatgctcggtttcgtggctgcgggctccaggtgctcgctgctcgcaaccgaggaggcccagaactaccagccgccaccgcccgaggtcctcaaagaccaagggattaaggtcaagcgccggcgcaagacgagcacaactcgccgacagtcgatcaagaaggcgaagctcgctgcgggcgagggaggggaagaggccgggccgagctcgactgcgggaccgtcgaccaagcctccgcccaaggcacccaaggccgcccgcaccaattctgatccgtcgacgtcaatatcgcgtcccgagccggcaagatcgctgtctgtgccctcggttccctacccgtcgcactcggtctcgccttcggtaccaggatcatccgactttggcgcagagggaggccgacacctgacgactttaccaaggcaaacggccttcgcccagccggctctgcctcaggccgccatcctcccaccgacactcgcacctcagcagcggccgtcgccgctcgtctccaactcgctcgggtcgctctcgatccgacgcgactcgacctcgcccgcgtcgacgccgctgtcgcacaagcggccgcacgactgggacttcatgccgcccctccacaaccacctgggcgccattacttccgcttcgccgtcattccagctcccgtcaccaagcttcttcggcgcctctccgaactacgctcttccctcgccagcttcctcgcacttgccgccgtcactgccatcggcacgcctgcctatccaccagcaacaccagccggctcaacaacacctcctgcatccccggccacaagccgccgccaagtcgccgatcaagctcgacttcctcttgacgccctggtcgccgacaaacgacaccatcggcccaggcagcatccggcctaggccgctcgagccgctcccgcccacgaccgaccggcctgccgacggcggcggcctcgcacgaccgcccgagctcgagcccgtcatcgaagagtcgcccgagaactcgcagcttaccttttcgcctcaagtcgttcggccgacgtcggcgatgatgggcgcgacggccaaatccgagccgcattcgacgccggtaacgatcattggctcgcttcgccatccgacgccgagtcccgcgctcgcgctctctgccggtggcggtcagacgcccggcggcggcattccgggctactcggcctccctcgggtccttcacctcgccatacgagggccggtcgcctctgccgcaagagctgctcgagacgcttgttgagcccgtccgtgaagagagggcggcgttccagagcgcgttcaagactgcgctcggctggctttttccttggtgcgatcccgctcggttcggcaaggcgtccagaggcggccagtgggcactctggagtctcggcgtccgcttgacgtacgccttttttcgaagttttggtcgaccgcagctggcgctgggctgacacgccccgcctcttgtttcgccagtgaaaccgaggacaagactaagaaggaccgcgcgcggttctacctcgcccgagccaaggagctcgccggcgtccaagcgatctcgagcgagccgacgatggaccacctcgagaccgtcatcctgatcgcctgtacgttctactgctccttcaagggcgatctaaagtactggttgacaaacatcaactgttgacaggggccgactacggcttggccgagagcgctcgcgcgacaaggaactggtgcggcgtcgccttgactatcgccgaagggctcggcgcgtacgatccagtaagccgatattctctctgtctcggcacgtggctgctgacggcctactctccccgtcacctaggatcctggcatcattccccggcttgtgaccgtccttcagtcgctgtaccagctcgacaagatcctgtcgatccgcctgcaccgcccgccagctttctctctcgcatcaccgctgtccaagttcatcccgcgacagcttggctgcccgacgtcggcctttgaggccatcacgacgctctgcggcttccttggccagatcgcctactgggagtaccaggtcaggcaggacccggcggccgagcgagaggcccgcagccagtcagaccaggtcttacagagcctcgagcgatggttgacggatctcaagggcaagaacggctacctgacgcgcaaggacgaggccgagagccgcggccgggtctgggtcgagctctggcttcagggcgtcttgtgcgtctcccgctgcggtctgtctttacccttacgcctttcgctgacctcgacgcactgctcttcagcatcctgctcaactcgccccggctgctgctgccgcaagccctgccgctcgacacgcacgtcgacgtcgccaggtcagtctctttgcgacatccgctgccagcttgacccgaccgctgactctgcccgccgctgttctgcagatcttcggccgaggccgtcacgacgctcatccagacgtactcgtctctctcgccctcggtcctcatttcgccctacctcgacgtgccggtccactttgcgctctcgacgatcgagtgcgacatcgagggcatggcctcgcccgcccagggactcgccggcctcggccagggcatcatgaaggaccagcggctcgaggagagccgggcgctgcgcgactggctcaaggatgccggcagcgtctggggcttctgatttctcgcccgaacaaagcgacttcttcggccggcggcgaagatcgaagacaacatctcgcgcttagcggccgtcgagcctttgatcgagagcgggcatccatgagatggaaatgatcgaacgaggaagcgcgcttgactccggcagggttttgatccgagacctgctgagccacgtcttgttcgatcgctgggcttcggcctcgagcatgccctcgacaggaagttcttgccgccgcggagacgagagaccgctgctcgtgtgcggaggaacatgcaaagagggggcctcgaaggctgcttcccacctcgaaggcaggctcgaggctgccatcgctccggctttgagcctggcctttcgttcggctcggtcgtccgtgcccttttcggtcgcccggggccggccgagtcatctggtggcgcaggcgacttggccaaaagaccggccgactgacctttctgcccctgtctgcccctcctcagactcgattgaaaggaggaagactgctgaggctggtcagtagagacaacttgatcgctctctgcgcctcacttgcaacgagaggcacgctcgctcgacagggtgttcggctggccccctctctctgccaagattaccggagcccccttgtttgcccgaatctgatggggttcgccggcggtgggtatctgatcgagcagaagactgcgtgcccgctccgtctctttcttccctcaaaaaaagggaaggcctcccttcttctctcgccctccttctcccaccaccctcctcctccttctcccatcccttgcctgccagagcccgtttcaagatgcaggcccaggtgcacgatgacaagcgctcctcgctcgatgatcactcgtcgaacgacgagaaggagcacgaccgcacccctcccgtcgcccagcagcccttcaacggcgtcgacgtgggcgacgaggccatcggcccgggcatcgtgacgaccgctaagtcgcgcggtgtcatgaagatggagctgctgatgggccggtacgtcctgctcggttgcttccttctttacttcccgcctagcccggctgaccgtcctttacttttcattcgctcgatctcctttggctcgatgtccttctctcgcagcctcaacaacaagtggctcattgccctgtacggcggcttcactctcctcgcctacgcaatgtcgctcggtacgtcgctctggcttcctgtcatccgaccaattatgtggctgactcgtcgatcgctccaacagaccagtacagcgccggaacgtacctgaccgttgccacaagccaggccttcaaggcccattcggtcctctctactgtcaacaccgtccgctccgtcttccaggcgtgagttgcagcgtcgcttgcggtttgccaacattccgcacgaaaactgacttccgtcctcggtctcttcgccaccctcagcgtctcgcagccgcccatcgcccggatctccgacgtcttcggccgtgtcgagactcactgcctctgcatctcgctctacgtcatcggtccgtagtgagagccccgttatcacctgtatccgacctgtcgccgaccttcctctttatccctcaggctacatcatcgtggcctcgtcgacctcaatctacagtcagtctatttcctttggacttagacccgcgtcggcctcgctgaccattcgctctcgctgaacatcatctcttgctttagtgtacgcggccggtaactcgatctacagtccgtctacctcctacttcagtagcgtcactgttcgctgactttctctcttccgatcgaaaagttgtgggtatcacaggcgcgttcctcctccagaacatcatcatcgtgcgaccttttttttgccttgaaaccctgagtcgtgactgatcgaccgcatcctttgtctgtagagtgagatttcgtcgcttcgaaaccggatcttctggtcgatcttcccctcgatccctggcgcgatcaacgtctgggtctctggcgacatcaccgaatcgatgctctcgcacgcttcgtggcgctggggctacggcatccacacgatcttaactccggtcctggcacttccgatcctcatcaccctctggctgggcatgcgccgcggcaagaaggacacgagcggcctctcggaggacgtcatccaggaggttgtcctcaagacgcgccgccgctcgctcaaggaggaggcaaagctcgccttctggcagctcgacttcatcggccttctcctccttgtcggcggtttcggcctcttcctcgtctcaatcacgctcgctaattcgaagaagacgacgtggtcttcgcgtaagccctccattgccaagcagactgtccgtcatcgcatcatgctgacggcttgcgctctctctacctccagcgcaatcgctcgcgatgctcatcaccggcgctggcatcaccgttatcttcatcctttgggagcgggtgcgttcgactgcttcctcctcatgctcccagactcgcgctgaccgatgttgcgcgcttgcagtttggcgccccgcacccgctcgtccccttccggctcctgacgagccggacggtcatcgcctgcctcttcatttcgctcttccatcccgtcgctatgggcatcgccgggtgcgctcttcaatccccgctctgctcatccacttgtccgatccgactgacatctgcccttcgcttttcagccaatacttcacgaccttcctcctcgtcgccggcaacaagtcggtcaaggctgccactcggatccgcaacatcccgtcctttgtctcgctcttctcggcccttagcacgggtgtcatcgtccgctacactaagcacatcaagcccgtcatgttggccggtttcgtcatcgagatcctcggcctcggtgagtgacggcctcctcggcgacttcgacttgatggccgtaacatcgctgacgctcatcttcctcatccagctctcatggttcgcttccgtcagagcaccaactcaaccggcgagatcattgccgtccagatcgtccgtggtatcggagccggcatgatctcgttcccgacccaggccgccatccagtcggtttccaagcacgagcacctcgcctcgatcaccgctttcaaccttttgatctactacatctcgggcggcatcggctctgccatcggaggagccctgtggaccacgcaagtccccggcaagcttgcttcttatatgccggacgccgccgctgctgccagcgcctacgcggaccccatcactttcatcaagaagtacgccgtcggaacggccgagcgcatggccgttgcccgtgctcatgacgagacgcagcgcctgatggtcacagtcgcctcgtgcatggccggtgccggcttcattgtgtcgctcttcctcgagaacgtcaaggtcggggacgagtcgacccttgccgaggtcgaggctctcgacgagtacggcacccagcgcatccagcctgcgtccgagacgtcggcgaccggcaacaagtcgtggctccagaaggcctggcgcttctaagacgtcgtcttggcgtctgatttttgctctcctttccctcttcacgacttgccctgcttacgcccgctcatacaatcctaaaagcctctcagcatcctcgaatagtttagactctctctaccgccctccccttctcgctcacatatgtcgcccaaccgcaatgcaacgtactgcttaacacgaatgatatttcggcggttgacccatttttgttctgagcaaagtgaaagctgatgtcgttgaatcagtagagacaacctgatcggtctctgcgccccgcttgcaacgagaggtaccgtcgcccgacatggtgtttggtcagccccctctctctgccaagatcatcggaggaaggccttccgaggctgagcacggccccgtcggcgcggctgcgtcttccgtcgtgctctaccacagtccctctctgacctgatgcctctcagctcgccaccgctgagaatgctgggaaatcatgctcaatccttcggcccgaccttcttcttgatcttggtcgagatgccgccgaaagcctgagccaagagcgcctggtcgacgacgacattctggccggcagccctcgcgctcgcgatgtcctccttgctgaccggccgcatgtcgaggttgacagtcgggagcttgagctttgcatgcttggcggccgggtcgaagccgagcggcgggaggtgcagcgtgacgatctgcaggttgtctgcggaacgaggcgggcgagagcgagggtcagaaggcggcgcccggccgagaacaagcgacgcaagacggacctatcgtcgcgccattcttgaggaggccctcggcaatcccaaagtcaaccagcttgcccttgccgagttggttgtcgagccgagagtagacgcgtatccgcccgctcggccggtacttgatgacacgcgcgcccgttcgactcgcaagagtcaagacggcgatcgggacggcgacggcgaccgctgcgtagacgtatgcccaagtgctggaaatgctcggcagcttggatgggatgtagccgaggacgccatcgaatatactcgccgactctggcgcgttggcaagcgtttccagtgtgccgttggccagaactacgccttcgggagagaaggctccctcctgaaccaccttcttgtcaagaaggtccgtcatcgacagactggcggccgtgctgtcggaagtagggaccgtcggaagtcagtggccgcgcacacagtgcgagatgggcccggcgaaacgcacaagcacgaggtcatcgagacggcgaagagcaggacggcccacgtcggcgacgacggcggccgctcgaacaccgtcattctgagaaaggagggccgtccaatggagtcagcacctacgacgagcagtcgtgacggtcccccgtgcgacgtcgactgactgtgcgtcctcttctggctccgtcgtcggcacccagagcgcgccgacgccgtccgccctgagctccattttgtctgcctcgatctcggccagagagcggactgctcgccgtggcggcgcagacctcggcgtccgatttgacgagggggccgcgtacgatcgacaaaggaaaggtcctgccggtccggcgagggtcggagctgctgacgcggcgacggcggcggcgagcggcgtgaggcacctgggccgcacaatttgtcggagggagagcatctccaaagctctgggatggagcagaccgttggatctgggttctcggctgcgtctagctgtcgagtttgtcgaggatcaagtgtgacgtcgtcgagagcaggcgggcgtcaggagggccagcacgacgcggttgccttcgcgtcccggctcgcctcctcccggaactacatcagccctcgacgaccgacttttgacagctgcacctaaacacctggtcgcagtcagattcaagattgaaaacgatcgcggaggacaccacctgtgcctgaggcggacgtccactcgggcgaccagccgctcgctcctcggcctgacccgcgcctctccgacgcagcatgggcgattgcgcgtgagttctccctcttctgccttcgtgtgttcgagattggactgaacaaagcaactctctgttcggaaggatctgcttcgggccgatcttctcgctacaggcagcgccgtcatcctctcagcggcagtcgtcgacgcctcggccggcgggccaggttggcgagccactcgagatcagtgccctcccctgcggccacgtctaccacaccggttgcgcgacccactggttccagacgcatgccagaaacgctaggacctgtccgctctgccggacgagctgctcggccgacggccagctccggctgaggttcacaggcgacccgtgggcggacgagcgggacgctgcgctcaagggcagccttggccgggctgcccggcggctcgctgagaaggcgagcaagactctcgatgtcgactcgcacgagcgaacggtggcaggctttgccaagaacatcgagggcgcgctcgagaccgtcaaggaggcggctgctggcgtcaaggaggagggcggcgaggaggcttggcttgcacttatcgatgacccggagctcaaggtctgtccgtcgcgtcgctcggctcgacgcgacacgtactaacggaccactttaccctctcttttcgtgaatgcagtcggccctccagtcgcttgccgcctctctggtcacgctcaattgcaagctccagtactcgcaccgcatcacctcgctcagcgcgaccgtctccgagctcgaggccgtcgcgctcgaacgctccgaagagctccgcacaatagaggcgacgagcgtcaaggcgctcaaggagttcaaggccaagatcatggacaaggtcgagcgcgagcggtcgcggtggaaggagaaggagctcgtacgtgagcgcgagtggcgcggcaaagagaagagctgggaggccaagcttgcgctcgccgagcaacgcgtccgagaagaggttcttgagaagaagcgtctccgagagtgagtctcgcgacaatcctgactgtccgaagcgggacgacagctgactctttgttcgccgtgcagagaggcctcctcactcgactcttcgctaaacacccggctgagttcgctcaacagcctcaagcagtcggtgagtgctctaaaaactcatcccagtactgagagtcgcgagtcgctgatccgacctgctctctcctcgacgtcgccagaacgccaaactcgtcagccggctcgagctagcaaagcaggagacggccaagctcgaggcgcgcatcgcctcactcgaggatacgctcgcgctcgcccagctgccgaagcccaaacgcggaccggcccctgacgcctgggacgaggacgagatggaccacgccggtctcgacgacagcgtggagatctacgaccaggatgctgacgcaagcgaggactttgtccatggtggcggcagaccgggaccgagcgccggccggaacgtgacagacgacagctttgaaattacgatgaaagacatcagctggcagagcgagccggccgtctatgctacgaatcggaccgtgagtggcgtcgctgcaaacacgtgttcgtgccgctgtctgatccccctgacattctttatcctccagcgacgtccctttggccagcagccgtcgaagctgtcgcgattagcggcgacatcgtcgacggcctcgtcggtttcgagctcgttcaagccgccgccattacaggcgttgccgtcagcgaaccggcccgtgccgcagtcgccaaggccgtcgccgcagtcgccaaggccgtcatcgtcgtcctcggccttcacctctggtccgcgacacaagccggcgccgacaaaggccaaaccaaagccgacagtgacggtccgggccaaggtggccgagaagggcggccaaatgcggctcgactttggcgccggccacggcatgcagcttgcactgggcgagcgcaagcgccgcaaggtcgacgtcgtctcgggcgtattgtagagagcctgtagaagtaggaagggtgagattgttgtacatgtactgctcgcttcacgtcaaggcccttcttgtcagtgctagttgggcgctgcgcagcagcaagcgacgtgctgtccctccgacagcgacagctgggctcctcatctgcctccaactcttctcggtacagagagcggtctgtaaaggcgaacctcgccagcatgcaagcgctcgtctatgacgttcgaccctcggccggagccggccagagcccggggcgagggcggcccggcacttgaacgacgctcgtgacccagctgggccggcgcagccgtgagatggtcggccgtcagccctcctgccggccaatacccaacagcccttcctcttcaatccagacatgacatcaagcatctcctcttcaagcccagcaggccttctcctggccgagctgtacgtgccagcgtcccctccctgcgcagtctgcgctgcgcacgccatcagctcgctgaccgcccgaccgcttgtctctcctcttgcagctctcgctccactctgtccgacggctcgcttcaggtcagtatcgcttcttggagatgaggcggctgcttctatgacgttggctgaagaggccgcccttgcctcgccctgctgcagctgcttgctcggctcgtcggcgagcttgtcgacgtctcggacgcggcgccgagcccagccgaccgcatgcggctcatcagcgccatctccaaagccgccaccgaggccgacaagactgaggccattgaggtgatccgctaccactggtatgactctacgctgtcactgaatcttgccttcgtcgcttcggtgcccaggttgacgaggccggttgggaggtcgtcggcccgaccccgatgcacacgcctccgacctcgccaatcaccacgacacgagggcttcctagccgcctctcgcttactcagaacgctcagggatcgtcgacgaccaagatgaacgacggaacttgggtcgctcctggctgggcgccggcccatcttcttccgcgaaccgacgtcgcgcagccgcccgctatgcaggtcgatgagcaggcgactctcggcgtcgactggtccgcgcctccttgggcagccaaggccatggaagagggagccactacgggctggacggctcctcgctgggctcggagtccatcgccgaagacggcgtcgcgcaaccaggatgcctacgttgagtcgtggcggttagttccgtcctttcatctcaccgtcgggcgcactgactgacctttagttggtgatgaaagcgtcgaggccgcccctttcaactggtcggcaccccagatcatcccttccaagcggtcgatgcccgaccactctcaggatgtccggcgccgggcttcgcaggtgggcgctcaagccgaggcctgggtgccgccttcctgggcattcgtagaggcatgaacgaaaagtgtcatgctcataccgttgcctgctctttcttctttccggcacttctcattttatcatcctgtatcagcaacagcttcaaactgcctctgtatcctcccttgtaccccgcgctccgacgactctccgatgaccacttgtactttgatgccccatgctcgcctccagccctcttttgaggcttgtagctgacggatctggtcgtcgccatcaatcgcaggctagcccttccattcagtgatggcgccgccccagctgacggccccctcgcagccccggtcaagcccattaagcaggctcatctgggacccggtcagcgcaaagtcgtaaacggccgcattctcgacgatccgggcgggatggatcgactttggcagagggataaagccgtgctggagcgaccagcgcaggaggacctgggcaggcgacttgccggtctgcagcagagacgcacgggttgggtcagggcgtcagtctcacaccttggtcttgtccaatggcgcgtatcgtcacacctcggaggcgacacgctggatgacggggtcgtccaggaactcggctcggcctattggacagtaagcttcaacggtaacgccgtgcaaccggcaaaattcgacaatgtctcggtactggcagcgcggatggacctgccgaggaacaggggtcagtcagtgcagtcgaagtggtcaacagagacgcccgccgcacctcgatctggttgacggccggcttcggtccggctcctgacgcgagcagctccttcagatggcacacgccgaaattgctaacgccaatgtcgatgagcttgccctccttctgcttctctgccaaggcgcgatacgaagcgagccgcttctctgacccagccagcgggtcgtgcaggaggaagaggtcgatgaaggaggtgtcgagccgtgcgagcgaggcctcgacggcatcgagagtctcctggtagccctgcagcttggcggtgatcttggaggctgagggaggcagagtcagcccctgcagattgcctgaatcaaatgtagagtactcactgatgaaaacatcctctcgccgtaggccgctatgcttgatggcctgtggcaacccaaatatcggcctccctgatcagccgacgggtgccttgtccaactcagagccagcagatcgacgcacctgcccaacaaactcttcgttcctgtagccgattgccgtatcgacgtgtcggtagccagcccgaaacgcagcgaggcaagcctcgacgcactcggttgggtcgcggacctggtacgagccgaggccgagcaacggcagggctgcgcctgaagcagaaacagaaggcgtcagtcagcggaggtgggtaggctttctgcgagacgcagccacgcacctgaaggcaagcggactgtagattggagagtgagcgctgcggtcgacattgaaggtcggcttgcgagatggtcgtagggagacagagagaggccaccccgttcagtcggaagtgagcgacggcgcaggcagggttaacggctcagctgccctatgtgtgctccttctttcaatgtaagtacgcaaagtacgaagctgtcacaacaatcgccactatcattctagtgacttcgctcacatgcaggagtagaggagctggtaagtagacaggtcaaggcagctgctgcgccctccgaactcgccgccctcgagctcgacgtcggctccggcccttcgtcctttcctcaacagccatcgccctcaacctaaccacagtcgcatgggcgtcttccagaagcgggcgttcgatgtccttttccttggctctgatggcttctctatcggctcgctcgacgctcttctcaggcggcgtggtgcgtctgcctgcgggcactccgcctcatgctccttgcgacgatctcgagctgacacatcgctcgttcgctcgtggccctacgctgacgtctgtcgtcggcgcagacctctggagcagcatgcacgtcgtgactccatcgagtaaggcaataggtcgcaagggaagggatttgtacgaaggtgcgtcgcttcggcaggctcgacgtcatccgttgccttcgcgctgacgacctgctcggcctcgtcgcccctgtagctccactcgcgtcagttgcactcgagaacggcctgcagacgactcaagttccttatgagggcttcaagcagtgggttgtatgtaaagaggtcgccctggtcgagccaatgccggagctgacgctgctcccacctgatcgtcccgcagccaccgaagccgttcgacgccatctcgccctcccacgtccttattacagcctcgttcggcgccatcctccccaagtcggtcctcggcctcttcccggcgcaccagacattgaacgtccacccgtcgctcctgccccgctaccgcggcgcgagcccaattcagtacgcgctccttaaccgcgacaggacgacaggcgtcactgtccaggagctgagcgatcacggagccgacaagggcgcgatattcacacagaaggagttcgtgcgtctgtcgaagggctgctggggtgctctgacaagttggcctgctaacgcacttcgccatgccatcaggatgtgccgccggacgcgacatacgggagcctcgtcgagccgctggcagacctcggaggctcgcttctcgtcgacacgctcgacgcgctggcgaacggaacagtgcgtcggcgtgtttggagatgactgcaaccctgccttctgctctgactaacaggctattgtgcaggctgagcccaagacgcagagcgcagaaggcgtcgtccgggcgcccaaggtccgcaaggagcttgccgtgattgactttggcaacagcgctgccgagatcgaagcattgcatcgcgccgtcggacatcaggtgctcatgaagcgtcgctccctgtttgggccttgcgcacgctgacgagtgcttgaccgacacgacagctcgtccttcgtacgaacctcccgaccgacccgccgctcggcctcctccttcacacgatgaccgcctcgtctgtctcgctccctcacccgcccggctcatgcgcgtttgaccctcggtcgggcgtgctcgagatcgcttgcggcggcggcggccacctgcgcgtgaacgaggtcaaggtcgacttcaagaagcggacggacgcgaagacggcctgggcgggcttgcgcgaccggaagctcgtcgggccggacggacgcgtccagctcgaggtcgtcgtcgctgcgagctgaaggacggagcaacgtcgacgtcccgctagcacgacgcgagctcgacctggtcgttgagtactggacggagttgagcgaagggagccccggccttcgtacgtgacgcctcggagcgtcggctctcttacgcccttcggcaacaagtagtcacgcctgctccgcgggaatcgccgagctgtaactccggcgtacacgccgactccccccccccccttgcgagacacaattctcatgccctcagcgcgcctgtctcgaagcatcgtctcgcgtctgagctcggcgtcgacatcgacagtcctgtagttgcatgggacgtttggagggaggcgcctcgacagctgctggccgcgggtgcttatgctcggccgggagcttagacgggcgaaccttgaaagttagggttagtccgttcggcctgcttcagcgggaccccttcttaacccagcggcccgaggagtcgtcgacctttctctcacaaccaccaccactccctcagtttaccctacccccaccactctcaccatactcgccaaaatgactgctcagtggaccgccaagtcagtccgcatctcgcttcctccaggcagacggtctgctcccgacaggacctgtcggccatctctccgggtcaccgcgccgtccctccgatgcccaattctcctgcctgcgcagatcgctgaccactctcttcttttgcgtttacaggaagttcacccttaacacgggtgctcagatgcctgccgtcggactgtgagtgtcgaaaaagttgctgcttgcagcgtgcgcctcgcctgcacagggctgattccttacccgccgctccatctctcgtaacgttccttttcttcagcggcgtacgtcttgccccttcggttgtccttccttcgagactccctgaactgactccctcgtctccctctcacagacatggcagtctggccccaacgaggtccgcaaggccgtcgccgccgctctcaaggtgcgtctcgtcggcgcattccagcgtttcggccatttgtcggtcctgccgtggaggcagcccaactgatcccgccgccctcttcctcccgacaggccggctaccgccacatcgacacggccgccgcttacggcaacgaggccgaggtcggccagggcatcgtcgactcgggcgtcccccgctccgagatctggcttacgaccaagctcaacaacccggaccacaagcgcgtcaaggaggcccttgaggactcgctcaagaacctcggcaccgactacgtcgacctctacctgagtgcgtgtcgctgctcctgtggcttgcgagcgcattcgactgaccgtctgccactctccccttcagtgcactggccctgctcgtcggaccccgccgatgagaagctccagaccgcctacaaggactggaacttcatcgacacctggaaggagatggagaagctggatgacaagaaggcccgcaacctcggcatttccaactttgacacggtcaaccttgacaagctcctgcccgaggcgaccaaggtcccggccgtcaaccagattgagctccaccccaacaacccgacgcccaagctcatcaagtacctcgaggacaagaagatccacgcgaccgcctactcgtgcctcggctcgaccaactcgcccctcgcgtccgaccaggtgattgccgacattgccaagaagcacaacacaacgacccaggccgtcctcctcgtctggggcctccagcgcggcacgtccgtcatccccaagtcggtcacgccctcgcggatcgaggccaactggacctcgctcgacgggctcaagctctcggacgaggagatggagactctctcgacccggccggaccgcttcaaggtttgcggcgactcgtggctcggccccggaaacgaggtcttccacgtccaggagtaaaaacagaatctgcgaccgctttctgggccgttgacgactcatcccctccccctgctgtatcaatcctcacgatgccatgagcctgcctctgcacttcgtcttccttttccgtgtcaggccggtgaggcgcagtcgatgacacggagagctgctaaaatgaacacaggagcacgtctcgccgcgtcacttagcagccagaaaggggcttctcttgagccgcttagccactcttcagccgcagcgcgcttcgaccagtcgaatatcatcactgatcgtatctaggccgcgactgcctttgcccgccggacaaactcttggcagcgctcctcaaccttctcgccgtcgtcgccctcgacgccgctgctgacgtcgacgcaccacggctggacctcgctcaccgcccgctcgacattgtctggagtgaggccgccagcgaggaggagcgggaaaccgccctcgacgccctggacgatgtcgcgcgcgatcgaccagtcaaaggctgcgccctggccgccgctgccgtccgacccactgccggcgtcaaggaggacgaacgagttgagctttggccggctgacatccgagggcgtgatcaagccgtcggtcggcgagacgtggcagacacgaatgactgggacagggatgaaggacgcccactcggccggctcctggccgtgcagttggacgaggtcgagcccgacctcgcggacgacgtgcaggatctcggcgagcggctggttctggaagacgccgacgaggagcggcagccggcccgctgcgagctgatcggcgtagtgcgcgaaccagcccttggcgctggcagacgcggctggctcgaaaggcttcggagggctggcgaagcggacctcgcgaacgagggccgagatcgacgaggcgaccggaagcgagacgcagcgcttcgacttgggcacgaagatgagcccgagcaggtcggcgccagcggcgagtgcgcgcgaggccgaaagagccgagcgaatgccgcagatcttgacgagcagctgcttgcgcgggccggagaccggtgtcgaggttggagactgggtcgaggacgctggcaagccgagcagctcctcgatgaatactcgaggctcctttgcgcgcatcaggctctcgccgatgagcaggccctgcacgccctccttgaggtagccctcgacgctctcccggccggtgattccgctgagggcgacgaggaccgtctggccgccctccttccggagcgcctcgttgacgcgcgacgtcgtcgacatgtcgacctcaaagtcgtgcaggttgcggttgttgacgccgatgagctttgcgccgagctcgagcgcgcgcgtcagctcggctgggttgttaacctcgacgaggggttccatgccgagcgcgaccgagtgggcgtagagctccttgagcagcggcgggtccagcatcgcgacgatcaggaggaccgtgtcggcaccatagagccgggcctcgtcaatctggtaggtcgcgaggataaagtccttgcggaggacggccggccggtcggggagctcgccgagcgcgagccggacctcgagcatgtcgagcagcgagcccttgaaccactttggctcagtcagaaccgagatgacgctcgctcccgcccgggcatacttgagcgcctgctcgggtgcgttcgtgtcgggcgcgatcgagcccttgctcgggctcgcccgcttcacctcggcgaggatcgcaggaagcggcgccgtctgcaaaaggcgcggcataacctggatgagcggcggcgcgagattgagagcgaggtgcttcttgagctgggccggcgtcgtagagaggtgcgacgacgaggccgagacgtcgagcagccgctgggcgtggatctgggtgaggatcgtcggcaggctctcctttgacgggttagcggccgggccgcgcgagttggacggcgtcgcggccgtcgccgactggagcgaggccggaacaggctcgccgtgaacctccttgtcgaccttctcgacgagcttcggtacctcgccttcgcgctcctggttgacgccgaactctgggcagtcggtccagcggccgccgtggaagttgagaaagttgcccatgagctcgagcccgccctcggagaggacagactcggggtggtactggacggcctcagccgtgaactcgcggtggcggacgccctggatgcagcccgactcggacgtcgcagacacctggaggacagacgggagcgagacgacgtcggccgcgagcgagtggtagcgcgtcgagcggagggcctggggcaggccgtggaaaagcccacggccgtcgtgcgtcacgagcgaggtcttgccgtggacgatctcgccggcaaagccgatctagatgtcgaaaatagggcatggcgggcaagatcagaccgtggccgcgccggcacgtacgagggaagacgcacctcgccaccaagctcgtcgacgagacactgaaggcccatgcagacgccgaggatgggcagctgagctcaaggaaagcacttcttgtcagcgtcggacgagcagggctgcagcgcacccgcgccggcgggcaggcccgcaggcgcagctcctgcgacaggaggacgtaccttgccgaggccccagcggatgacgggtcgcgagatgcccgagtcggtccgtggatggccgggaccgggcgagatgacaatgtttttgaggatgccagcgttgaagtacgtctggcgtcgggcaggatgagcagcagtcggcctcatccgtcagcctgggctgaacggacgaacgtgagctccagcagcaaatgacctacctcgacctcctcgatcgtaatctcgtcattccggacgacgcggacgttggcgccgagctgctcgaggtactggtagaggttgtgcgtgaacgagtcatagttgtcgatcatgagcgtgaatctgagggttcgccggccgggaggagatgagggacggagtcggtcagccgagaggcggatattgagacgagcgcacgtcactcggactcactgctctggcccggcggcagaggacgtgctggaggccatcctgagtagcaatctaagagaagagtaaggtagcaggtggccggagggaagcttactgacttttggcttggggactgactccgctagcaggtgcgtggaagcgatcgactctcggaggggccgacgggatgcacgtcggccaggtcggagcaacctccagcgacatcaccacacgactcctcgacttgactctttacccggttcttggtccactcttccaggccgctcgcactcgcccgggacccacaacaagcggtgaagaagcagcaggcgttcctttcgtcgcccttccttgtccggcgcgctcccctcttcgccgccgccgccgcgtcgcaccatcggcccacctccgcctgcttcgatctccacgccggcgaacagagaccatggccggcctccctggcgctgtcggtggaccgtcgcgcctgctggcgtcgttcggccgggcggtgcctgccgtcgtccgctcctcacggcccgctgcaggtcggtcccttctccgtgcctctttctccgcgagctcagccgcagcccagcaaggatgacgctcacgccgctctttgcctccctgctgttcttcctctcgctcgccagcctcgccgtctaggccagtacttgcgctcgctcagatgccgttactctctacgaggtcgttcagcacctggccgtcgacgaggtgctcgacgatggcgtcctcaatagccgcgtcgtcgccggccgccccttccgccatcctcgccgccgtcgctcatcgccggctacactctggccctcccctccgcaatgctcctccagcctcgccctctccctcctcggcacctgccgcaccgccagccgacccagtgccgaattctccgccatcggcccccggcccgccgcaggacaagaagaagctcgcgtcgctgatcccgacaaaggagacgacgtcgtcgatccgaaagctgctcgagctcgcgaggccggagcgacagacgatcatttgggcgattgggctgctgatcgtcagcagtaccatcagcatgagcgtcccgctcacgatcggcaagctcatcgacttcttcgcgtcgtcggatagcgtacgtcgctcccgccctctgctgcacgtgcgcccagatagactgacctccccttcggcataccaggagcgcttcctcggcctctcgttccccgtcgctgccgccgtcctgacgtccttcttcgtcatcggcgcggcctgcaacgccgcccgggcctacctgatgcgcctctcgggccagcgcatcatcgcccgcgtccgcaaggatgcctaccgcaacgtcctccggcaggaggtcgagtttgccgacaagggcgtgggcgacatcctcagtcggctcgggagcgacacgacgatcgtcggcgagagcgtcactaacaacctgagcgacggcctgcgcgcgctcatcagtgccatcgtcggaggtgcgtaccccctctcgagtcgacgtcgactgatctgttgctgattctcgacatctcgctgcagtcggcgccatggtctacatctcgaccaagctgacgatggtcatgctggccgtcgtcccgcccgtctcgctcggcgctgtcttctacggccgctacctccgcaacctctcgaagcagacccaggacgccctcggcgacatgaccaaagtggccgaagagaagctgtcggccttccggacactgacggccttcaactcgcagtgcgtccctctcattttatgtgcccggcacaatcgccgactgaccatcgcccctgtcgctcgcccgcccagaccgcaggaggtcgtgagcttttcgcagaaggtcgacgtcgtcctcaaccttgcccggaaggaggcgatggcgagcggcatcttttttggcggcaccggccttacgggcaacctgacgatgctctgcctgctcggctacggcggccacctcgtcagcctcggcgagattagcgtgggcagcttgacgtcgctgctcatttacaccgggtgcgtccggctgtgcgcgtaatctcgtgtctcgtcgtccgtgggctgacctcgtgtggtttgggcagctacgtcggcggctccgtctcgggcctgaccggcttctttaccggcctgatgaagggcgtcggcgccggcacgcgcgtctttgagctcctcgatcgcgtgccaaccatctcagcgacggcgggcgaggtcctctcaaagagccgcaacggcgacatcatcttccacggaacgacgtttgcgtacccgtcccggccgggggtcaaggtcctcaacgaggtcgacctcaagatccagcggggcacgagcgtcgccatcgtgtacgtccgcctcgctcgcgtcccttacgacgggcttaagctgaccttagctgtcgccgcggctcagtggcccgagcggctctggcaagagttcgttccacggcctcctcctgcgctactacgacccggaccaaggctacgtcacgtttgacggcgatgatatccggtccttcacgaccgagtcgtggcgcgacaagctcggcatcgtcccgcaggacccgccgctcttcaccggcaccgtcttcgagaacatcgcctatggcacgccagctgcgagcgaggaggacgtcattcgtgcggcgcgctcggccaactgcgagttcgtctttgacttgcccgaggggcttctgacgatggtcggcaaggccagcttgagcggtggacagaagcagcgcagtgcgtctttctccacgctttctcccctctcggtcggtcgtacagctgacgctgcttcccatatcctcagtcgctatcgcccgggcgctcgtacgcaacccgagcgtgctccttcttgacgaggcgacgtcggcgctcgacagcggggccgagagccaggtcaattccgccatctcgtcaatcctcgcccagaagaacatcaccgtcattctcgtcgcccatcggctgagctcgatcgcccaggccgagacggtcatcgtccttgagaatgggcgggtgacggagcagggcctctatgccgagctcgtgcgtggcgttcttccctttcgcttccgcttgggccgcttgctgaccgcatgcgctcgtacttctgcagtcgacgagcgagaactcgcgcttccggcatctgatggccgcccagcttgcgctcgagggccgcaagagctcggccccggccgcaccgctcccgaccgaggacgcagcgtcggcggaggaggcccctgtcgctgagcgcgaggaggcggtcattcttgaggagagcgccgaggagatcgagcgcggtagacgggcggtcggaggagtatagccatgatccttggtaggaaaaaaaggatcgtcgaggtgcttttgagacgttctgcaagtgacccctaggtggatgaccgcgcactagtccggggtcgtgccgccgtcgcgccgaacctcgcgtctgccgtcagcaagcaagcagcatcgacccgccagcctcgcctttacaggtcacgtctgtctccagaagtcgctcggctctctcgtcagccagctacctcgacgactcggaccagcagatcagcgtgtgactcgctccaacggccggaccgctacctgtctccctcgcaagcgccggccgcgatcttctcctctgcgtcagcctggctgcctcgaccaaggctgcatacacaacactttggcgacgcgtcggacgcctactcgcctagtctggcacactcgcttcccgctccagcccggtcgacatgacggaccagtcgacgtctgccgccgcggccgcgcctccgccgcctccgacggctgccgcctcctccccggtagcggctcagccggtgccctcgtcctcgggcacgtcgccagtcttcatcgggcggcagtctcggccagatgtcgctaccgtcccgagctcgccggtggtcgcctccagccccccgagtgcgaagacggcagcgccgcctgctctcggacgcgtctctcccgtcgtcaccctcgccggcaggactcctgcgaaccagccagctgctcccgccgctgcacccgcacaattgctcggctcgtcgttgctcctcgcgcccatctcgtcgtcgtcgttcatggtggcgatcggcaatgtcgcccgcgcacgctcggctcaggcaacggcggccgctgcgggacgcccgacgtcgtcgcccagctcgcccgccggcgtgtcgcgatcaaagccacctaagctggccgaccctcgcggggttgtggcaacggcgtcgagcaagaattctcctgccaaggctccgcacgtcagaggtgcgttcgggaagactgactcttgcgctggagggaggctgacctgctcgtcctcggcttgacttccgacgccagcgtccacgcaggccgctccgctcgtgtcgtcgctcactgccgcctcagtgccagcgtcggcaacggtcgtcgctccgtcggttgccgttccagctgcagcattcgagtcgcctcaggctgcgctcgtcagcgagccagcctctcccatggttcttgtcgccccgacggcgcagcggactctcgacgtttcgccgccggtgacgaccactgccatgcgggcgccgcctgcggcatccgctgcgacgctcgtcgttgcctcggcacctgtgtcgacctctgcttcagttgtcgcgccaccggcgccgactccccccgtgacgaccgagtcatcggttccgacttcagcatcgacgccggccatggtcgaagcttgcatgggcttacctctggccgaagcggcgaggcccgtcgcttcaacggtcactccttccgcctcgagaccagacccgactctggtcgctcctccgcccatgcgcatcaagctcaaggtcagcgcgccggctccagcaccgtcgccgcggacgaagcccaaggctgccgctcctcgccggtcagtctctgtcttgcctgtccgcgacgatatctacaatttgccgtcggacgacgacgacgacatgatcgagtgcgagcccgacccagaagacatcaagcccgtcatcctccccaagcgcccggaaccagcgcccgtcaagccgtctcagcgcggaccgtcgtcgatcgaccgagacgcagacgaggagcgcgagcgcaagcggcgcaagagagagaagttcgaggaggagcgcgaggagacgcgtcggaaggacgctcggcgcagggccaaggaggaagagaaggaacgcctccgggagaaggagaaagcgcgcgagcgcgagggcaagcgggcggcactcgcggcgtggaagaagccctcggacaccgactcgttcaagtcggccagcggctccaagtcgaccggctcgttgaaggacgctcggctaggccagtcgtccagcaagccgtcgtcgattgcttcacatcccgctccgcccaaaccggtccctcagcagtcgatctttatcaagaagcctgcaccgttgacgctggcgccgtggaagccaccagtcgagacgcctctgttctcgcgggcgacccccggtccgagcatcgaccttacggcggaagactcgtctcccgctcctcatgcagagcctccagtttcgcttaagcggccagctcggccctcatcgccgattgaggaggagcccttcgccaaacggcccgctccatctggccggcagatagcgtcgggcaagcagacgagccagctcttgagcagcgtcttctcgttcctcgagtcgggcgaggtcgagcagatcgtccgggatgagcacccggtcgatgaaccgcgcgagaaggccaaagatgacgctttcatcagcatcacggacgacgaaggcgagaacgaggcaccgatccggccaaagttctacggcgagtcgtcggctcacccttcttcgtcgagcaggccgatcgatgacgacacggccatggacgtcgacgcgacgccggcgccgacacagcggcggaagcagaggccggtgccccctccagtcttccagagccgtgagggcagcgccgctccgctcccgccgagcaacatggagaccgccgtcccggtcgaggtcaagacggataacgacatgccggcgatcgacgccaatctcgtcacccaaatgcacaagggccgaggtacgtcgcgatgttagagtccgggttatctatgctcagcagctgatctcgtccaactatcgcgctcgttgcagagctctcattcaaaaagggctccgacggctttttcaactgcacagtctgccgcgcctacacaaagccgcatccgatcctcttcaagattcacgtcgtccgctgcgccgccgagtatgaagactacccgaccgacacgtccggctcggaggccgcgtctgacacatcgtacacctcggcggctaaaacgaaaggcaaaggcaaggctgtcgccgagaccgacagcgacgatgccggctctggctctggtccggcttcggacgacgacgacgatggcggcaagcgccagcaggccaaaaaggacaagacggccgagcgcaacgcccgcaaggagaagctcgcggccaagaacgcgacccgcaaagaaaagcgcgaagccaagaagcagcgccgcgacctcaaggacagcaagaatgattcgaaggaaaagaaggagcagaagcctcggatccggaaggagaaccgcaagatcctgtcgctcgctcggccgtccggcagcggtggccccggcctcactcgggtcaaaaagcagcagccggccgacaacgacgacgaggtcgagcacattgacgtcaagccgctcggtggcacgaagcgccagcagccgtttgcgcggtcggccgccgtcacgctcgaccaggagcacctcgtcgtcgactcggatgactctgaatcggacgaagacgacgacaccattgtcgtcctcgtccggggctcgggtgcgtcgccgacgccccacatgactcttccacgctcggactgacctttgttgctcctcgtcccagtcgttcacgtcaagccgatgtccgacggccgctactcgtgcccggcctgcaacaactacaagtgcaagaacccgggctatctcaaggagcacgtcctgcgctgcaagcgcgccgtcattgttcccggcaccaacccgacggcgcccgacccggctctcttggcttcatatcgcgcgcgctcgccctcagttgcggttccaccgcccgcgctcgtccgggcgaagaacatcaagagccgcaactcgccggcgctaagagccgcgctgccgagcttccgcaagaagacggtcggcttcaccgagcagctctactcggccggactgtccagtcgggccggcccgtcgcgtctcgctgagagttcggtctcatatcaggagcgtgtcgctgcggccttcatgtcggatcaggtccgtcagccgccgtcacacatggatgacgagtacatcgacagcggcttcgacgctggccgctgctcgcctccggcagaccagcgcctctcgcctccgcctcggacgtcggccgccaacctcgagccgctctcgcgattgggcggcgcatatggcctctactcggacgggttccagtccgagcatgagcgcatgcgggcgtcaccttcaccgccacggtcgccgccactaggcggcctcatcgaagacggctcgcttcggaccgaccacccggcaccaggcgtcctcgttcacacgctggctaacctgatgtacccgatcatgactaagccgccgccgatggcgctcatgcaggacatcccgctcctgctcgagctcctgcgcaagtggcaggccgtcatcatctcggacgctcgcaagggcttcgagaacggcgtcgctaatgctcatgagggccgaatcctccgccgggcgtggtcgtcgatgatgcaggcaagcccggtcgagacccgctacagcacctggcaggacaacgcgatgcgactctgggttagtccctagttctaacgacactgcgccgagcattctgactgacgcccgttcgccatctgcagcacctccaaacgcaactgacgaaccacgtcgagaagccgtcgatttttcgcgacctcatcgcttgctactttgacctcaagaaccggccgaccatctggggctcgggccggaccgaacaaaagcatattgcccacctcggctcagcctgtcacaacctgctccgctcggttgccgacgccatcaaggtctacaagggccctagtcagctttcgggcaagtggctcgaaaacgccaacatctcggtcgtgacacccgtccaccgtgagtgccggtcttacgctgctgagttgagcagacgatcgctgacgcttcatcatgacgacgccctctcagtggacctgaaccacgcctcgtgggaggacatctcgcgcgacatgctcgactgggccgacaacatcctcatctgctaccaggacctgctcgaggtcgagaagaagtcgtgcgaggtcgccgacgcaaaggctcggagcgagctcgagcaccgggctcgtctcgccgcctattgccagggctacggcgcccgctaggctgatcggtcgacctcccgcgcaggcagacctcctcctctagaaccccaccccttgccatccagtttcgcacctgtagtcttcctcccctctgatcggcggtcgtcctctcgactgtctttcgccctcttgcttacttactttatctacgccttccgttgcatgcgatgcccaccgtttccctctatccgtgcactaacgcgagagtggtgatgatcagggtgcattcgttagtcggccgctacaacacgtcagaaagtgggtctatggtgtacaacgtagggaggcggagagatgcggagtaacaaggcgtcggcgagaagagagcgggagaaggaggaaacgaggtgagagagacgacgctcgtgaggtcaaagccggcccgacgtctggagcgcattctcaagcagctgccgccggagctcgtcctcgtcactggagctgctttcgccgtggccggcggccgaatgcagaagctcgccaacaaagtcgtggtcccagccggcgcgctcgacgagggccgccttctgcgacggctcgaggtaggacatcgtcgtgatcaggaggagcgcctggttcgtcaacgggccttcgtcgtcgttgtcgtcggccggtgcgaagttgcctagagccgtcgagtcctcggactcttccttgagctcgaactcgtggattggcggcgatgatgccgtcggtgggggtgccgatgggcctcgctgctgcgaggccgaaccagagctgccgctgatgcccgaggtgttcgagtcccgtctctggccgggatcggcttcgccgccgtctggacgaggagctgcgtccgtcgtcgaggccaaggccgagcctgagccgtcgggtgaagacgacgaagatgccgcttgtggcgccgggggcagcgccgcgagcacctgctcgccgatctcaaccccgcgccggacgagcgtcaaaagctcgcgcagctggccttggatgtcggcgagcgtctgggcgttgtcgagcgcgctcagagcggggtcgaggttaccgagctgctgctggaggctagcgacaatgtggtgggtcgaagcgctgccgctcggtccggatccggcggcgaacgacggggccgaatgagaggcgggcaccgaggaggagcttgatgatgggccgaagtagggacgcttgatgggcggtccgatgccgctgacgccgagcgcggcggcgttggcgagcgaggtcgtcgagaccgcggcgtaggcccgcttgttgttcgccggcggtggtgggggcaggtgcgagatgctcgtcgaggggccggcgctcgacatcgagtgctgaaagctctgcagaaggagaagttgcgaatgataagcgtctgctctgcctttgctagcgcagcactggtcaggacgcacctcgttgaggaccgagccgagcaagcccgccgcgccgtcctcatggctagcgacgtcgtcgacgcgcataaagctctcctccatcccacccatgccgagtccggccagatggtcgccaaacgccccaacgccagccgcgccatgctgcgctccgctgccaacgcaggtgctcggcgagccctcgtgcgtgtgcgtgtgcgtctgcgattgcggctggctaaacgctgggtcgtggacgtgcaagagctgctgtccgagctggtgctggcgacggtagccgacgagctcctcgaactcgacaaagagcgggaacgagtgcgatttgtaccgagcagcgaagggattgacctagcgagcgagtgggcggacgagtgagcagaggccgtccagcttaagaagccgatctgaagcgcacctcaatctgcttggcccaggcctcggccgaggcgtggaagcgctgctctgcttcgctccaatggaagtcactgtgcatcatgagctccttgaagggctgatagagcgtgcggatcatctgtgcgtgggcaaggcactgtcaggtcttctgcctgaatcaagggaaggcaggcgtctgaacgctccagcttcaggcggtctttgcatggctgggtttccttcttctggccctggagcgtcgtctcctggacggcctcgacgacgcgctcccagctcgaggccaggaagccgtgctccgtctcgtgtccagcccgcttctcggctagcagcacgcggaccatcgccgcgtcgtcggcggcgaaccagcgcgtcggcgccgcccgcttcttcttgccagcaccattgctgccattggcggtgatcggtccgggtgcgccgcctgcgccggcaccgttcgtcgacgaggcctgggcgtcgctgctgttggcgccgtggtggtcagatgacccaccggccgggtgagacgcgtgcagtgttgcgagcggcgcgttttggagagccggatcgagatggagtgcatgccgctgctggctttgctgttgctgttgctgtgggtgatactgctggtagaccggctgttgctgctgctgctgcaaggctaggtgttgcatcggctgacccgccgacgagtcgagatggccgacctgcgatggcggctgaaggccgtcgcccggcgaggtgcctcccgctccgcccgcaaccgacaacgaggatgtctgacgatccactccggatggatgagaggcgtaggccggaggtggcgctattgatggtgccgtcgcccgttcgagctggggttggtgctgctgctgctggatgtgaccaccggcgaggtgcggccgttgctgttgctgctgctgctgctggtactgcagagcctgccgctgctgcggctgcccgaattgctgcccttgctgctgctgctgctgaccgtccatcctgtctggatgaggatctcgctggtcgctgcgcgtgccggccggttcagctgtggttgagccggttggaggagcgaaacgtcccgttctggtggcgaaaccttgagcaccgcaaagcttcgcccgcgtgacccctttttcgtccccccgccggccgaggcagacacgagctatggccgaacttgcactcgctgcctgccgaccatcatcgactctgccatctttctgtctcctcaggtcgcctctgcgcaggcagtctggactgacaagggagcgacgtctttgccgcctcaagcggatgccgctcggtgcccggcaaagaccgacctccctctgcttcacttgtgcgtacctccttgctcctcttcccaacacaatcacacttccctccaaaggattactacgtggcatttggtgtcaagctgtccgttcgcctcctgtttcatcctcccagaggggacggcaagcggcgggcgaggcggttgatggcgataacttcactctaccttataaacttttatatgaaatctctccattttcttttctacccctctcctgctccctaccccgtcctagctgccttactgacctgctgttttgcccttcgccttgatgatcaggaaatcacttgcctttcgcccgctaatgcgccgccgcggtcagcttcgacctttaatcgtcagacttcgttcgcctgataattctcgccaatcactcttgagctgctgcggtccagtcctcggttcgacatgcccgcattccagtcccggatcatcaattgttgagaattttcgatcgcgggatcgcctggcgtgttcggcccgccgcttcgaatccctttttctccaggttcgtcccctcttatctcctctcccacaccaccatcccttcccaaacccaacgatgtatcagcctcaaaagctgcaatgttagactacgggaccgtggacctttcaaccacgaaatgccgacacaaaaatttaaactgagatcccccccaaccgccgtctcgtcctcgcctacttgctcgtgcgtcacgctgaccttccgctctcttcaaccactcagttgtatgccttctgtgatctatgtctcgtgcatccaccgtatgactcgtcccgcgggagcagaaagcgttctgggtcaatgttgagccgcgaccaggtcgtgtctttgaggcgcagacacttcgccgacgtcgagcccgagctgcttccagacaaacgttccaaataaagcggcatgcgatccgacggcgtatcagaagatgacgtcctcgtccttcccgccgaggacgtcctccctcccgccaacctcgttgtcagcctcggccttcctccgctcgcgcgcctcccgcgccgcctcgtcctcctcggccagcttggcccgggcgacgatgtcggccgccgcggccttctccttcttcttgccctgaacctttttcagccggaagaagtcttcgcggtccatttcgtcgagctcgctgcggagtgagggcagagtagcgacgtcgagcgtcagccgggaggttgagagtgcaggtgacgcaagtcgacgcacgaaatgatgaacttgaccgtctcctcaagccgggggatgatgatgtgctcaattgagttgacacgccggttcgtcgcccggatgacctcgtcgagaacggtgaaggccgtctgggagatgggcggtcagcgaaggtcagcctcaatctgcgacccgctacgacccggcttcgcgacgcacctgtaacgacgcgagctcgacaagcgtctcgaccgccttgacgtacgtctccctgcatttctggatctcgcgcccaccccggccgagacccgtcaagccaaactcgctctggccgtccttcttgacgggctcaaacgccgggaggacgacgcctgagacgttctccgacttggcgctgacggtgaacgtcgcggtcgataccgactcgagaatctggtacgtgatctgcgggccggtggagtagatgacggacgcgagcgagaaggaagccagctggaggacgcggcccatccgacgcttggcctgcgcgtgagtgaagtggttggcaggttagcgatgacgctctcatatgaggtgcaagcgcggaggtcgagccgacggctcgccagcagcaggtggccagcagcagtatctcaaggtctaagagcgattctctgcaagccacctcgagcgagcggccctaatgcaagccggcacgccacgcagacaggagcgacgcacctcgtcgaccttcttgagaatcgcccggaagcgcgtcatgagcgcgtcgcgcttcttggcgagaagcgagtggccggtctgggcgctcttgagctggaccttggtgttggtcagcgccatccgggtcgggctggtgagagatgagcagcggaacggtcagtagagccgacaggagggcgaggaagggagatgcagatgggtctggcgaggcgcggtacgccgcctgagccggccggctggacgcacaaggggcgagacatggcggacgaagaccggcgtttcggtagagcagcaacgagctgggtagacagcgatctaggtgcgaaaagcggaagtggcgaggcgaaggcgagtcgcggtcggagggacgggtcagcagcggccgagctcgaccttcgtagcgtcagccgcccaggcatacctacttgccctagactctcacaccagcccttgcacctcttcggtctctttgttccttgggccgtatacgtagcgtatgcccatcggcgccttccgctgctcgacccgaccagtcgtccgatctaccctcgcctcggccgcgcgtcactccctccggatggcgtccagcaagcccttcagcccgccggcgacagcctcgtcgacaccgcccgctgcggctgacggtcaggagccctcagctacaccggaggacagctacgaacctcttcgcatgcaaatcgtcatccgccgggacctcaagacggtctgtccctcgccgcctgtcggttccttcgcgcgactgacaatgtccgccccgttccgcgcagtaggacctcgaatggcccgagggtgccatcatcgcccagggaagccatgcctcgacggctgtcttgcacaagttccgagcggatccggccgtcgaggagtatcttgatcggctcgagtcgatgcacaaggtccgcgctgctgcttcagctctcggagtcgtctgactctgatctgactactgacgcgtcgctctcttgctgtcgtggcttgcaggtcgtctggtcggtcagcacactggcaaagcttgctgtgcagtctatctcagctaggaggctgacggatatgtcgcttccctactcgcagacgaagaacctcgattcgctccaaaagttgtcggccaagctgtcggcccaggagccgccgatacagcactatgtcgtgcgtctcttccatcagccggtccgcacgctcgtcctcatgcgctccctcctccctgcacagtgggtcgagcagcccgaaaacgtcccgacggcgctcgccgtcgtgccgaaccgggtcgagcagggcgtactcgccctcatcaagaagtcaaagtgctcgagctggaagtagatgacacgatggccttgcgccagtctgccaggatacctgctctggaagagcgtctggggatgcctccacctgggcgacagttcgcgaagcaacacgcgactttgacggcaggctgcgccagaggagcgcgacggctgggcagccttgaccgccgcctcttttgagcctcttcttattttttgctgggatattgatttgcaatctgcaccttcctcgaccgtactcagcgaaggcttcgtgcagagtgctaagtcagtcatagactcccccgactcaggccaggacgactgccctcagcggcaggcagagacgcgcgcggcggtgggcctcttcaacaacctcccgacgtccacctgcacgaccgccccgaccgtcatccaaccgcatctctcctcgaaaggtcactcacagaacacggtcgacgacgctctcgcttcgcacgctcgattaccagcaacaggtctagtaaacgactcggcggaagctgtccgacaggtggtccatctcgtcgcgcccctctctcgccccgccacaaccgccgacgacgactgacgacgtcgcgtcgaccggcccatccattgctctcctcgccatcgcgacgtcaaggtgagtcgagtgcctgcagctctctatccttgtcgtctcgtgctccttctgacgcgtcttttgtctcgtaaatgcgtcaggctttgaccctcggccgtcctcccttgtcagcctcgccacccgagcgagcgagcgcctccctcgtcctacttccgacgaccgccgtcggcccttctttcgcttcaagaacgacctctcgaccgcctagccgccatcagctcgctccggcctcgacatcctccctctctcttgtcgagccatgtccgacattgtgagtgttgcagcgagctcgggcccttgattggctggccaggcaatcggggctgatctcctgtcgccatctcccctcgcagccacaagacgccgccgcaccaatggcgcctccgccgccgaaggagcagaagccgactgcaccgcccgcgccacctgccggtcggacgacgcgaagcaaggcccgagcggcccaggtccgtcttctgccggttgcatctctgctcgaccgccgagcacccgtcgccatccggggctgacccggcgagctccgccgtcgcgcgctcctcctccccctccgcagtatgccagcagcccggctatgggctctgtcgagtttgactcgagcctgacgtcggctctgctctcactctcaaccgcgttcgtctcgggcggcagcggtccaggtggcggcggcggaccgtcgcggccaaactactctgagggctcgctcgatccggaggacgacgagcaggagtcaatggagggcgacgacgagccgatggactgtgtcaagcgcgacccgtcgcgcgtcgcctgcgtctaccgcggtgacgtcccgctgacggtcaaagatttccgcaacccggccggcgggctctttgtccgctgccggtggtgccgggcgcggacgacggcgtcgagccgggcgaccaaggcccgcaaggagggcctcaagccagagtttccgctcaaccatcttcctgacccgaacgtcatcccgccgacaattggaggcatgtgcgtcgccttggtcgccatctgactctccatttcgtcgtgcgacgctgacacgcgctgcttcacacaggtcgaccgagggctgggagcccgtttgctcaatcaagggctgcaaggcgccccacccgcttacgatcaacgacttcctcaacagctacggcgaccggctctaccgcatgtgcacgacctgccggaacgatgccgcccggagccgcgaccgcaacaagaagcgcaagtcgggccagctcgacgagatctcggacgccggcggcgagaagctcgagtgcgtgctcagataccctttgacgtcctctggtgccgcactgaccttgtcaagcctgcgacctcctacagcgtcgagacaacgccgatcccgccctgctcgggcaaaggctgcgccgcgacccggccgctcgtcctccaggacttcctcaacccatacggcgacgcgctcctcaagatgtgctcgttctgccgggcccggcactcgtcgtacaagaaggccaagaagctgggcatcgccaatggtggcggcgccggcggcggcgagcgcggccgcgaggaggaggctgccgaggtcctgagccacctcgccagcgggagcgcctccgagggctcagagccgggcaagaagaagaagagtgcgtatatgctcagaggattcatcgccgactcgtctctaacttgcgcttttgaccgccgtctgcgcagaagccaaggccaagtcgaaggccagcgccaaggcggatcccaactcgtcagcgagcgggttccctgcgccggccgaccctttcgccgccgagggcttttcacacccgtacggcctccaggcgctcggcgcgtcgaccggcatcgcatccggcagcaatgtcccgtttggcgtctcgctggactcgaccctgccggtcggcgcgaccgtctctgccaacggctttgactactcgcagatcgacttcaccaacatcgacccaaacatcgacccggcgctcttgccgtcggagccgatggacgttctcgctgcacacggcggcggagggcagctcagcagcggcgcctttgtgccattcgactattccgtgcccgtaccaatggccgcgtacttccttcgcctgccctcgaggtctgtggatgcatagctgacggccttctctccctcccgcttctgcaggccgacggttgactacggagtcgacgccgtgcccgtctgcgcgacccagtcgtgcaaggccaagcggccgctgacgatccaggactttttgagctcggacggcaagcggctgctcgcgacgtgctcgccctgccgatcgtacaacgtcaacagaccgtccaacatcaagaagcgccagcagatgtcggcgtccgaggctgcttccgagcagtcgatctgaaagtcggaccgctaccaccgacctcgtttggacgctcgcctatcgccgaccatccctgtactttaacgacggcggctctcggctggatcccctctgtcggccaggccttgcttccgcttcacgaccctcttccgtccgcgaccgcagtgtgcgatcttccctctgcttccctttcacgctcagtcggctgaccttggacgggtcctcgctgctacttagattcgctttctctctctctcttttcttggtgaccggttaatgttcttcgcgggccccgccgcgcgcttggacgccgacgggtcgaccggctttcttccctcttcgattagttccccactctccttccgttgtagcccttgtcgtccggcgaggttcatatagcgcgtgtatgcgtcctttatctgccatccgagccctggtcgggccggcgcgtgagagggagggccgagcgcgcagtcaatcaaaggggctcgacagcaaaacgcccttgagccggccgagcgacgagctgagctcccgacccgttgacgaccacccgacccgaccacaactcgatcccgaacgccctcttgcgtctcaggggccctcaagaccactctcaccagcctcgcgtcttgactgacgacgacgacgacatgattcagtgcgagcccgacccggacgatgtcaagcagtcacctgcccttcctccggtcgcaccggcagcagcgcccgctccactggacccaggcaagctcaaggccaagcagccgacgcgaatcaagaccgacacagctcctgtcgccgtcgcacggccgcagaagacgtcggctctcgcaaagacgaccggcgaaaagagcggcaagcagccagcagggtcaaagcctgccgagggcaagcggcgcattaatattacctcaagggcacttccgagcgcatcgtcaacacgactgaacggccatccgcgttcaagggcagaggtaagaagcgcctcgggagacgacgacgacggccggtctccgccgagggccagccggcgcaaagctcctgccgtagcaaccaaggccaagccggcgacggtcgatgattcgctgccgtagggacatggctcagatgacgaagacaacggctcggtcgcggtcgtcgttcggggcgagcgtgggtgccctttcggcttttgtccaaccttcgcggacgctgattttttagtgtctttttcgcttcagctacgatggtctcgcccgtcgaccgccgctacacctgcccggcctgcaactcgtacgcctgccggaacctgacctccttcaaggaccacgtcaaatcgtgcgcgcgagctgctgtccggcccggcacaagcctgaccgcgcccgatccgactgtgtcgctcgcgcctttccacggcgccgcctcctcgaccgctacacctgcacccccgcagcaagcggcccgtggcgcccgttcgaccatcggatcctcaaacgccttgctgccgacttttgacaagaagagtcagaacgccacagtcgagagtcaagccggctcgttcgccgtccaggcgccgctccctttgccgctgccaccggcagacttctctgtccctgtcccggactctcactgggccacctcgtcatccttgccgcgggtcttgcctccgtcaacgctttccctccaaacgtcaacctttcccggcggctcgaaccttgcttagaacggatggccaacgccacccggcagctacctctcgagctgtgtcggcggccgtcgttttgagccagacacctctcgagcgtcagcttcgccaccacactggccaccgacggccgtcgtacgcgatccatatgacgcctcgtgggagatcggccggaaagctgctctacgcgctgcagtttctcttgatcaacgtcgtcccgcccccggccaatttgatgcgcgagatattgccgcttcttgagcacctccgtgcttggcaggccaggctgatcgcggatgccaggtatgcagtgaccagcagtgaggccagcgcgcgtgagcggatgattctccgcgacgtctatgagtcgctcaaggttccgagccccgtcgagatccgctaccgcacttcgatgcgcctttgggtgagtctttatccgtgtcaagttgtgcgctcgccggaaggcggctgaccccttgtgaattcattccctctgtcttcctgcaatatctccaggtgcgttcttcagagctgtctcgcaactcctttagatgctgacggtgacgacgtccattttcgttcagcaccatctcattacggtgcttgagcgccctcccatctaccgggatctcctcaagttgtactttcagagacatccggtccgccgtccctgctggaaaggagcagcgccacctcgccgatgtctcggctacggccgaacgactctggcactcggtccaatcgatctggatcggctgccgcggcccgatcagtcagacggccgagtggctccagaaggcccacattacggtcacgcggcccgtcccgctctccctgaatcacgttgggtggacccaggtctgcgaggagatgctggaatggggcgaggggatcgtgctcgctcacgatcgcctgaccgacctcgagaccgagtcgcgtgaggctaccgaggcgctttacggccagtggctgctcaaacatcaccttcacatcgcctccggccagaacagctcgctttgacgagcatgccgcagcggcttccgaccctcttccttcgatctccttcgcctgaagtctcaatcatgcccgttgttctcccatcaaaaaatgaatgtcagagcagaaaagacgagcgtcatggcattcgacggcatagaagggtcaagtcgggcgtcgtgattaccgaagtaagggccgcactcctaaggcgagagttccttttgccgcgcgagctcgttctcttcgagcaaccggacgaaagctactcgctccaccgacgggagggcttgcaggacctccggcgtcgccatgggcgccagcggctgggcgcgagccgacgagactgctgggaaagaccgctgcgccgggtgctcggcgacggcgtagttctgctgggggacgtcggccggtggaatgttgtacgaggcggcgccaatggcctgcgcaattgggtcgccaccgacggcggcagcgtaggccaggtaggtcgagcccgcgtccgagtagggtccctggccaggcaggccagcacagagggtaagggcagcgccgtaggcgtcggcagcctggtgtgactcgtgcgatggtggcggcggcagcgcatacgagctagaggcgtaagcaatctggcccgtgtacgagtcgtgcgacgtggccgagggcgcgtagccgtactgctggccgtaagacgcctgaggctgcgagtagagcgacgaggacggcccagctgcgtatgagagcggggcgactggcgacgtggacgccggcttgctgcccgaagcagccgcggaattggcgccattgcctgatgcgccgagtgcggacgggcctcgcgggtccttgcgccggcgcttggtctcgcggggcgaggaggtctgggcagggacctcgaccgtgttggggtcgacctggccgggcgtcaccggccacgggaagcggcagctcttgatgatatgcgtgcgcgcgagaaccgagtcgcgtgacgtgtaacctgggcagcgcaggcagcggaagaagccgtcctcgctccgccggatgaggtgtactgcagagcgcatgtgcagaggaagagcgagccagttagtttgactgcgaggcgcgcaaaatgcggcagcaacgtaccctggccggccgggtcggtgatcgaggtctccatctgatgcgtcttcctgcaagcgagcaagaggagagcgtcagctgaaaaagccggatcgcggcgtgttggtcaagcggggctgaccggtaatgcatcgcgcggtcgctctcagacttgagctggatcggcgggtcgcagcgggtgcacatccagaccttgccggccgacgagtcctcagtcgtctgcgagcggccggcgatagtcgcgtttactccttcgccctcgaccggcgcgatcggcttgccgtcggcgtcaaaggtcatctggtcggccgcggggacgcgcgttgaagccttgggccggcgactcttgggcttcgccgagccccggctcgctggcggcgccggagggtccgatgggccagtgtagacggccttgcagtttttggcgtgcgtctgaaggctgaccgggtcgcggttgcagaagtctcggcatttggggcagaagaagtgatcatcttcccggtagaccttgatcgctacgggcgggtcaggtcagcgactggttagccgatttgacaagcgggtgattgtctgtgacagcacgtactgtggcccggctcgggcgcgccaatcgtgcacatcgtctggtggtacacgcggtggtgcaccttcttgaccgattggtttgtaaacgccagcgccggcacgcagatgcggcacgtgacctgccacgacgactgctcgccctcctggaggacgtgctggccgggctgacagacagtcgcgcaaaaggagccagcgtcagctcctgagctggttctagagaaggtgagcaaggtaaagggtgcaccttgctgccgtccgaagccgccgtcgaggcccgattcttgcgcttaggctcgccgacccgcggccggctcaagcgctcctcctcctcgctgtcaagctcttccgacgcaaccgcctcgtactccgggtgctcctcgtcgtctgagagctcgtcctgagtgagcgtgaccggcttgaccttcagcgagcgagcgctctcgctgcgtcggggggcaccacgcttggtgaggccctcgcttgacagaccggcagaagactgcgtctgcgcattcgtcgacgacgtcggagccgccagcgtgcctgcggggctgagtgtcggaaagaaggccgagtcatgggcgggcgtcgagccgattgggccggctgcgagctgagggacgagctcgggatccatccgagctgcactgcggatgcccatctcagcgaggtcggcctcgccctcggcatcgatgctcatgtcgtcggccgagaggccttctgatgggcctggcgaccgcttgggtggcggagacggcggcgggaggttgagcagaggtgcggcaggcgcggcggctggcgaagccggcgcgacggcagcctggcggccccgggcgcgcccggccggcttgactgggttcgaagccgcggggacctctgtcggccatggagcggtgcactcgtggtcgacgtgctcgtggtaattgactggatttccggccgagaacgagttgcagcgcgggcacttgaagcgctttgaccgagcctcgcgccggatcaagaacactgcgaatgagcggcgtcagccggctgtcagaggggcagcatcgacttgacgaagcaagacgtaccgaggcccgaaggcgacgtgacaatcaaattaccgccacgagggacggacatgctctgctccttgggcgggcgggccgcccggcgcggtgcgacaggggcagcatgctggacgggcggtgccgcgaacacggtctgaatggccacggtgttcggagcgatccgcgatgctttgacgagcgacgagaggccctcgtttgtacccggccgcttcgacgcctcgcgcagctgggccggcgtcgggaagaggctcgacggcgggtaggcgacctcgaggtgggccggcagctttcgccgacggcactggcggaggtgcgcctcaaggtttggctcgtgcgagcacttgaagacgcggcagcgcgagcaggcaaacggctcgtcgacggcaccgctcgcgagcgaccggaggctcatcgcaagctcgagcgctgcaggtcctgctgcgtcgggcggcgtccgcgggctgggctcgtcgtcggccgacacggaggtcgcgacgtctccccctttgtctcctgcgcgatggccgaggaagccggctcgcgagctcgtcagcgcttagaactgaggcggctggcaatgcgcggcagcgcaccatcgacatccatgtcgttcggacgggccaccgaatcaggggcagcagaggagcccgaaacggcgccggcgaactcgtcaggccgtgacttcgcccggtcgagctcgtcgcgcgtcgcgtacgagcggccggtccggatgtcgacgtagggcttgagcggcgctggcagaggcagcacaggtgcttccgctgtgacttccatctctgagcgagctggcttcggacaaagtatggatggatggcgggaggaaggtcagggcgggaggttaaggagagcatggcgagcacggccggcgacgacgcagcacgcgctgcccgcacacgtgagtcgtccaacgccgccacctgtttcgatcacttcgcacgccaactcagagtcccagagccatgcaaggtggcctgatcgctcgaggatgacaaggctgatcgtagcataaagctcatgagatcgtgtcggtcgtgccagtcgtgcgtgaggcagaggggaagtcgtgaatgcgccacgcgaagggaagccgtggaatcgcaggttgcacctcgttcgaaggatgacaacgagcgaggatgggtcctcagtcagagaggttggcggccgggaagtcgatcgtgacctgtaaccggggcggatggtcagcacaagtcgtgctcgctggccattacagcgggacactcacattcttccagacgagcccgagtgcatagggcttgacgtcagggaagccgacgccgtctgcccatctacttccaggactatccagggcacctttgccccagacagcctggcagcgaccggccagcgccggcgtcaggctcgcccagcgctcggttccgaccagctcgtctccggcggcactcgcaccggtcgtcccgtcgaagagcggcggcatgaccagtcggaggtcgagagggatgtagcgtgtcttgagcgggaacgccggcaagatcgacggcgtcaggacgacgctgaagaacggttccagcgcgaacgaggtcgcgtcgggtttcgcggtcgaggtgcaggcaaagactgagacgcgggtcgggcctgacggcttcaatgggtcgaccggctggaaggcgaagcgggcgaggtgtttcgggatgttccagttgcgccggccgttgacgacagaggcgaacgtcgagacgtagatacgggtgatgcggagggcaggcttgctcggccgtctgctgctgctgacgccctcgccgccgccgctactgcgaactgggcctgttggcgcctcaaagctgcccgggacgtagatgagctcgtcgtacggaccgaccgggctctcggtgtagcggatgagctggacgttggtgagcccgccgacgaggcggccgtgctgctcggcctcagccgcctgaaccgggtcgtaagcggcttgaagcagctcaggcgagctccaaggcagcaaggtcggcgacggaaagaaccagtaggcgtcgcccttgagggtccagggcggaggagcctccgtaccaaaggcggccgggaaggacgccgaggtcgggatgatagcagcagaagcttcggcaggaggcacggccgtcggcgagatggctggcgtcggaggcctggcgagctcggcaaacgtcgccggctctgcggtagtggacatctgcgtcggccgtgcgtcaaggttcagcgtcccttcacgttgagctgatcgaggtgcggacccgccttgtacttagagcagttggcggtcgtcgcttgaggaggagtggatgttcgcgggcaactcaacgtcgtcgactcgcgctctcgggctccaaaaagaaaggggccgctggagaccaggatcgagaggcgcaactgcgatgccaggaaacaggtgccaatgaggtacaaagtagcgcatatttatggatagctagacctgcgcatcgcgcagcttcgtcacgagctggttacctccctctacagcggtcaagacgtcgcccacccaatcgaccaagtcggtcttgagcttctcccaggggacggtgtcgagtgggacgtacttgccgccctgaagatacgttcggacgcggcgttcttgtggcctgagcaagggaagagacaggcaatcacgtcatctgagggccggtgagaaatgaagcggctgggactcacccttcgttgggagcgatcgcggcgacggccgcgtccttcgccagagagaagcaggtcgcgcggagaatgagcgcgcctggcgagccctcgagacgcgccttgccgcctggcgacgaggcaggcactgcgacgggtggtggaaagcagtcttcgatggtcgccgtgatggttggcaggtcggccggatcgtggacgatcatgcggcggacgcgctgaaagagggaggcagatgaccaggtcagcgcacgtcgacgagagtttcggaggcgcaggagggctggcacgcacccagagttgatagctctcgactatgtgatgctcagctcgagggaaggcagcgggcgacgtctcaaacgagccgatcgtatccacgacgcatttgccgaccttgggcgacttgtcggccagatggagcaggaggatgccgagcgagtcgatgacgcgcccgcgcgcctcgacaaagttgctcagcggtcggtcgaggacggccgactcgccgtggaagtcgagcgtgagttcgtctatcgacgtagcgctgaaggaaaggaggaagattagtcaggacaatctctgattcagagtcgagactgtacgtacaacagaagcttcgctgctgaggcaatgacctccgcaagctgagctaccagcgcttccagaagttccgggagagtcatcttggtctcttctggcggcacggcgctgccagtcggcgaagcgagcggccggcgcaggtgcacctgtaggcgtcaatcgccgatcagcctagggcaatcggagcgaatgacagagaggacaagccgcgacgcacgtcgtagggcgtcgaggagccggaatttggcagcgatatccgccgagggccgctgaacgcggacgagctgcttacaagagggtccaccgagtcaatgttggccgccaatcaaagggaggccgaaggcgcgcacctgaagagtggtggtgtcgtcgtcgccgtgtccttttgctgcagctggcgcgctttcttctgcagctgcggctgcgagctccgccggcgcaagcggttcgtctcgcggcagaatacgcaggcccgcttcttcgaaccattccggtgatcaaagtcgattggcgcgagaggccgaggcgcgacgcaggacgatgggcctttaccccggaagccgacgcagaaaggctgcgcgatcgggcccgttgatgggcccgcctcggctgacgtcgcgctgggcgggcctgcgtcgggcgtcgcgaggccgagagcagcggccggcgtcgcaaggctgccagcagcgtcgggcgagacgacgtcaggctggacggtcttctccgccggtgggcggatgagtcggatcttgaggctgggcggcgcacgtgccgcctcgagcttgacgactggctgcttgatgacgggcggctcgacggcaggtgcctccgcggccagcgactggatgacaggcactgacgaagcggccttgaggtccgaggccgccggcatcgaggctgccacttccgaggctggtggtagaatgagagccggattgctgccggacggtgctggaatggcgccttcgagagcttcggccttgacgctgcgtgggcggaagagcatgtcagctggtaaccgagcagcacggccgccaagaggcctgaaaggccgaaaggagcatcagacgcacgcagcattcttctgaatgtagcccagctggtaagcgctatttgtcgcccggcagtactggcagcatttgagccgtttgccccgcttcatgaagtcttctgagatgagcggcttcgttgagaggcagccgcgccggtagccagggcagtagacatctccagcaggagcgggaatcaaatatctaaagaaagtcgcactcgtcagtttcgagatcatagtccgaaagtaagcagggagtgagactcactcaatcggcatggcggcaggtgcaggcttcgtctgggtgttaatcgactcggacgttgcttcgctcgtgtcgccgggcgccagaccgtcgagcgcgctgtcgctcctcggaaaaccctgcggtgaggccgccgtcgtctgcagcttctggcgcttcctggaggagcacgacggcggcgctgcggcggctgcctgaaccggtggcggcggcggtgcggggctcagcgaccttttgcgctcggggaggagctcagccggccgtggctcataaaggcggttgtcgcctccgaaacggtccattgggttcagaggcttagaagcctgcagaagtagagcggtgcaaaaggtgaagatgagcaggagttcgtgcgagacgcgcgaccggcgccgacgacgcacagtaactgctctgggctcgccggatggccgaagctgctgtagctgcagcgccgcctggagctcgtcgtgggtgtgacggcctgctgggagaggcggctcgctcgaaggcggaggaaccgtccaggcgagagccgacatgtgctcgtgctcggctcgccgtctttcctggtccgcgacgagcctggaaacgcggacgaccgtgagcaaaaggagcagccaacgtcatcagaagagaggctgaagagttgtgacaggcggagggcacgcaccaaggaggggtttggctaaaggacgccatgcgatggggccgctttctcgaggttgcgaggaggtagcgacggtcgcctgggctgagccgacgacgcggtcggagggagtggagggcgctcaacctgcgaggcgcccttgagctaccagccgctggactcgctcaggcctggctctttggatccagtaacaagctgagcgtggaccgggcggagagagtggggaatgaaagagtggctgtcgggtgaagagactaggaagaagtggcagggctcaagctgcgcggctgctgcaacagccagcctgtcgccgctggcgcgtacgtaataaatagcgggcccgggccacttttataatctaggtcaggaaaaacttcgcctgctcgtgagacacgccagaattacttgcgggctcgttcgcaatcttttccctcgacaactttatggctaaaatttgcgctttgcgcctcgcagaatcgcccgcccgcgtcgtcgggtcgagacgagtatgtggctgtcccgcacgccatctaggcgccgtcgaccctcggtgcagtgtcagcgcacgaaggcgttttggtagacaggctcaatacttgaatgttggcgtgcggattgaggatcagacgtcctttgctagagagcgcgcgatgctccagacggaatgagcgcggcctgcagaaaagtggagcgactcgcgccgttcctgacatacctgtgcctcgagcaacacggtcgctgcgggtcctcgcagaccactgagtggtgtccggtaagagggaggtgcctgcgtctggtaggatcatgctcgggaccgctgtggagtccggtaagagggaggtgcctgcgtctggtaggatcatgctcgggaccgctgtggtgtccggtgacggtcgttagccatcgcgaccttcgctagcccagccagacctgctggcgagccctgcagtctaaaggcagagagcgagaggacggccttcgccgccgttggtctgggagatggcacgcgtcgctcgagcccaccgcgacgacccaaacgaagaccgcgcacgatcagcttcttgatcgacttgatcgacgagggacgtcagcgaccgctcggccgtcgacttcggccccgggtcagcccatccttcccgtcttcgctggcggccagaggcggaggccgaccgagctctctgtcgatgcggaggcaggcgcgcaccgcccggcgttcgcaagccagcgttcggcctcgggcgagcttttgggggtcggtcggggagagaatgacgcgcgccgcaaagagcccacgcggggcaaagccgaggcgccatcgggcaggcactttgtcgatccagcgcgacctttcgtccaactgtgttcgactttgctttcggaatcaagttgctgatcaatcatgatcgctcatggacgccatttctttcgtttttatttcttttttcttccaagcgaaagcggatcaggggccgcatcgaacatccctcagcccctccgagaggactcttgagtgcggcaagtcggcgtcgtccctcttgcactcctgtaccgccacccttcccttcttccttccacctctacgacaatggccggccccaacgacgacctcgagatcatcatgctcggcaccggttcgtccaaccagcttgccgcttcgtctccgatcgctggcgcagctctctctgcggccgctgacgagcttgacgcgttcccttcttcctcctcctcccgcacacgccgctcgatcccatcgacacgcctttgcccgtctcaccaggcacgtccggccagctgcccaacgtctcgtgcctgaccgaccacctctcggacgagccgggaccgccctgccgcacctgcctctcgacgctctacccgtccggaagcaagaacgtgcggcgcaacacgtcggccgtcgttcgcgggacgaggccagacggttcaaagtcgtacgtcatctaagcttctcgggcgcggcctcgaggtcgtgctgctccccaggtgccgcgtgctgaagtttcgccttcccgtttcgctcggccaggacgatcttgatcgactgcggcaagagcttcctgagctcggcgcttgaattcttcccgaagaacggcatgcgccagatcgacgctgtcctactcacgcacccgcacgccgatggtcagtcacgcatttcagctggtggcgcactttgcagctctgtgttggttgattgagcgcacgagactgacgtcgctgcttccttccctcccttatcgccatcggctcgtcccatttttcgatcagccatcaacgggctggatgaccttcgtggctggacgctcaagggcgtcgtccagccgttcatcaaaatctactgcgtgcgtcttttgctgcctgtgctgctcggcgctgtgtgcggtggctttcgctgaccagtttgtccctccgactgcactcccacccttcagacggccttcacgctcaaggaaatcgccgccagctggccttacatggtcgagacgtcgcgcgcgaccggtggcggcgacgtccctgctttcgagtggcacgtcattgacgaggagcgcgactttgtcgtcgaaggcattcgcatcacgcctctgaacggtgcgttcgcctgtgccttgtaagccgccgctccttaacctgatccaaacatcccacctacgctgcagtccaccacggccgtttcttctctacgaaaccggcaccgggcacgcctccgtcaaccccggagcccgttcagccgtactactgcctcggcttcgtctttcacccgcacattgtttacctctcggacgtctccttcatcccgccggcggtttgggacaagctcctactgacggacggcgcccgatcggctctcgagggcctcaaggtcgacccggagcgatcggctgccgccagtgccgactggctgacgccgccagcgtcgccgccgacgacacccgaagacgagctcctcgccgacgtcggcgccctctcgtcgccgcttgccggccagccgagaaagccgtggccggtcgtcctgctcgactgcctcttcttgacgacccacacgagccactttggcctgctcgacgccctcagtgcaatccttcggctcggagcggccaggacgtacctctttggctttgctcaccacgtcgcgcatgaggagtgggaggcgctcggccgcgagctcgacggctcgaggctcgtaggcgacgaggacgcctttgtcgccaaggctatggcaatcggcggcgaggtcgctaagcaggtccgcgagaagcgggcgtttgttcggccggcatttgacggcctccggctcgtctgccgacgagacgacgccgagggcccgagcacggtcgacgagtgcgagcccgagcgcgccgtcttgcccgcttcgtggaggagccgccagccgacgccggtagaggacgtccagatgtccgagcagacggacatgccctgctgctcgggctgcgctgcctgagagcgtgcgccgcctctcgctatttcgtccctcgtctgcttctctccgcttcgaccatctgtcacttttaccttgccatcccacccctgtagccttcaaaccaccccttttcaacactcttagaatcgcgccccaggcacagcgtgcgcgtcgactgctcatgctcgtcggacggaacctacccttagaccgtcggctcctccgacgtcacttcgcccctccctgccccactcgtccgatctcgcccatctgctttcgtctcgcctcctctctttctcaaccctacatggaccgcctcctcgcgtctgctgttgtacatttctctactcgcgcccggcgtcgctcgccggacccctatccaaaccgccctaatcggcctcccgtccgcggcctcgagagcaacttcctcttttgcgcagcgtcgtcgaaagctctcatgcagatcgctccctggcacagactgactgctcagtcgtcctcttcgcgcttggcatcgcgcgtccggcgggccttgagcggccgctcgcgcagcttgttgtcggcaaaaccccggtcgcgacgcttgtgcgactccttcttggcctcgttgcgcttctccttgcgctgggcggcggcggccgggttggtcgtgacctgagcggagtgaggagggcaaagtcagctctagccggtcgaaagtggatgcggaggaacggaccttgatgatgcgctggttccgcctcgcctggcgcttcatcgccttggtccgggcgatcgagttccaaacagacgagaaggccgagacgccgaccttgtcctggacgagcgtctggagctcaatcgcaaggttgcgcatctcgtctgcgaggcggcgacgaaaggctggggtcagcgagtgaacggttgtgatcaaccccagaagtgacagaaacgcaccctcgcccttcatgtcgccgtcgagcacacgctggatgggatgcaggacctgcatcaggaacggcgtgacctgctccgccgggaggacagtgtagagcgccgcaatgagccggaagatagccataatcggcagcgaccggcggggctgcgggtgagagagagcgtggcgcaaggagattcgtcgggtcagcgacgacgtgcagtgaaatttcaagcagagaacggatactgaccgaaacctcgccgtgaattgctggccgcgtgatgaggatgtgccgcgccgtctgcgagagcttcgtgaagagccacgcaagcgggtttgacagcgcccgagtaacggcaacctcttcgctgacctcttcgtcgacgtcgatgggtgcctcctccggcgcctcctcttcctcctcctcctcggcctcagcctcggcgtaggggtcaaccggcgcgctgtcatcgtccgcctcgacgacggcggccgggaatgcggcgttcgcctcgctcgggccaagggcgaagcagcggccgagatagaccatattcttgacgacctgcatcgacaggccctcgtcaatgctctcgcccttgagctggagcagactcttacgggcgatgtcgaagagaccgcgcggctgaagcgggccgagatcggtagccgaagcgcgagcgcggtcgaacagaggtgggctggtgccgaaaagcatgccaagcaggcgcgacgacgcgagccggacccaggcatgcgggaatagcatgtggccgacgaccggctgccactcgactgatgacacgcgctccggcaggacgtggaggaccttggcgagcgagttaagcgcctgatagggcaactgccagtccagctcgtcctcaatgtccatgccgaagggcgagggctcgtcttgggccgtctcgaacgcctcgagggtaacggccgaggtcgcgagcattgcctgaaggtcgagcaggatcatcgacacaaatggcgaggcgtccgtcttgagggcgtcgacaaagaggccgtagacctgagcggccaatcgcggcagctgggcctgcgacgacgtctcggcccaggtatggagggtcgcgaccgactttgaccgctggtcctcgtccattcgctggaagagcgagcggacgagctcggccgcaaactcgcggcacttgatcgagtcgtcgttggcgatgaccatgacgagcgcgacgaggaataggtccgagtactcgcggatgagctcgagcgagaacttgttgaaaacggcgctgatgagctccatgaccgagagccggccgctctcgtacgtgtaggccaggttcttggccaggaactgcatctgcttcttgagccggcccttgccctgggggtagtcgagcaggaactggaggagggtgacgcggcagagctcttggacttgggtcgacgagccggtgaccatgagctcggcgacgcggtccatgatgtcgtaaatgtcggcgaggataaagcggcgcgagatgatcgcccggaggatcgtaaagagcgttgactgccgaaccgggtcttccatgtcgggcgtgatgatgtcaaggatgtatttgagctgctttgggctgatctcgaccgtcttgcagtcgcgcatgatgacggcgagcgtcttcagtgccgcctgacagacctccgagtcggtcccgcccgattgcttgacgatgacgaagacctgctggacgagcgtcgggatcgctgccggcagtgactcgagcggacacttgacgaggctgccggtcgccttgaggccagcaatcacgacgccagagtcggccgcgtagagcgtgttgccgatgacgttgaccaaaggttcgagccgagcgaggatctcggggttggcaaaattaaagtgcccgcgccggaagccggtgacaaagagctcgaggccgaaagcgacaaacttctgggcgttggccgcgtaatggtcggcctccttcttgacgacgcgcttcatgtcgacgtggaagttcttggccgacgctgtcaccttgttggcctcgagccggctcgattttgccttgaccttgaggaactgagagttctggccgacgagcgtgtggcagaggacgagcatgtcgcccggcgtcacgcgctcgttcgagttgagcccagtcgagatccggcgaaggacgtcgtcgacctgctggaggatgcggagcacctgcgtcgtctggaggatctcacgcactggcagcagcatcgacttgagcttgcccggcgagacgaggcgcgcaacgagctggaacgtgtcgagacccttggcagtcgacgaccggacctcgcgcatcttcgtcttgaagccctcggcttggaggtccttgcccgactcgccaaagacgacctcaccggcgatggcaacgacgttggcgacacagtcgtcgaggtcgctgaagtcggccgaagcgagtgcagtcacatggacgaggattgcgtgaatgacgaaggccaggatgtgaagctgcggtccgcgctggagcgaggccttcatctcttggacgaccgaagagagccaggacgggccgagaatgacggtgatcttgatgatcgtctccttggcaaggtcgcgtgtctcttgagacttgctccggaaaacctggctgagcgtcgtcaagaggcgcgagatctgcgcatcgcgcgtgctctcgggcaggttgagtgccaccttgacgataccgatcgcgatcggcagccggatcgagtcctcggtctcgtccttctgctcgaggtactgaagcagcgacggcagcagcttggcctcgacggcgtcagcgatacgaaccgcctgtgaccgcgtcggctcggcagtggctgcgtgagcagggcaggtcagcactgcacgagagctgctcgtcgtcgaaggaaagtttgcttaccagcgtcagccgcaacctgagcgtccgcgtctccgtcagcgccctcggtctgagcgacgtcgtctgcggaagtaatgcatgggcgagtcagcgatggttctctagcaatggaagctgcgacagaagcttacctccgacgtccggctctggggcctttgttggctcttctacgaccgcatcctccatcgaaaagtggaagccgtcgaggacggcgacgaccgtgcggacgtagtacttctcgttgtcgtccttcagccgcccgagccggaggtactggcggacgagtgcgttgtaggcgccccacttgaggtgacgcgagaccttgcccgtcgtcgcgatcgtctcgttgatcagattatggtcgaccttgcccgaggcgccaacgatgaagtgcgagatgagcgggaggaagacatcggcgagcaggctcgagttgctgagcgtgccctcgtcgcagaggtccgaaagccgatggagcgcgcgcacgcggcggtggatctggatgtgatggatgttggagaagaaggacgcctccgagtcgccgccggcgaggagcggcgccatctcctgcatgagcgggatgtgatcgcacgagccgacggcggcagcaaggacactcaggatctcggtccggacgagctcgacccgtgagcgcagaccgtttcgcaggcctgggtagagcatgcggacgaatgtcgactggatcgcttcgtcgtcgcgtcgcttggcgacgagctcgatgaagcgccgcattgcgtaggccgagttgacgcggatcgccatctcctccgggtcctggacgaagtggagcatgttgtaaaggatcggcagccactcttgcggcatcagagttgcgtacagcttctcattgagcaggttgtaggcctcgagtcggcggtcgaagtcgggctcctcgcgccggcgctccgaaaacgcgttgagcgagacaacgacgtcggtcgacgcctgcaggctcgagtcggcctcggcaaacttctcgaacgcgcgacacagcgcctgccgggcctgacgcgagcggatcgtccggaagagggtggcgagcagcgtgtagagccgagtgaagaagtcggaggtcgggtcgcagaagtcgggcacaagcgggacgaggttctcgaagatagtgaggatgttcgtcttagtcttctccgagatgaccttgtgtggctggcgaagcatcggcgagagcaggccaatgaggcgcgcgctttggctgccgttcgagacgtaggcggcgagatccgacaagatgcgaatctgccgcttggcgagctcgtcccggacgggtccgaggccgacagggttttcgacgagcgtcgccagccgatcgaggagctcgtccgtgttcggcgtgacgatgtcgtcgacgatgaacgcccgctgatcctcgtcttcggctgccgaggcgtgggcgaggatgcgctcgacaatgtcgaacgtcttggagatgacggccgccttgacgttggtcgccgttaggcacgagtagaccttggcaagcagctgccggtcgtatttgacaaggatcggcaactgcgcctcgaggccggaccaaactgcaaagagctcaagcagaccggacggcgcttgcgtgttctcggcgtcgagcgcagcgagccggggcgtgatgaacgaccggaaggctggcggcaggtacggcgaaaagtcgaagaccggcgcggcggccgacttgaagaagtcggcgaagcgcttgatgccgagctggcggaccgtccgaagcggagcgatgtggtgactcggctcgtcgtcttcgggctcgtcggcttcgggctcatcggcagcggcagcctcctcggcgttgccggcgacgatgatcaggtcggcgtcctcgggcacgtcctcatcctccttcatcttgcccagcctcttctgcgcgcggtggacgagctccatcgtcacgccgagcaggcgcggccagaagccaacgagctgcgggccgagcggcttgagcacatcgccgagcagggtgaggaaaccgatctgctgcttgccggggatgccgttggcgagaacgtcgtcggccgcgaaggcaaactcggagctcgagctcgaggcaccctcgagcgccgcaaagggcgcaagcatcaggttgacaaagacctcgagctcggagggcaggcaaccggccagcgcggcgaggatcgcctgcttgcgagtctggacgccggcgcctttgccacgccgctggatgagcttgccgtagagcagccggatgaggatcggcaggagctcctgccgatgggccgggttgatgacgtcgttctctttggccgacagcgagaacttggtgagcgtgtcgcggaagcgtgcgtcgtccatgagcatggtgatgttgtccttgtacggcgtgatcgagcccgatttgaaggtaaaaaggcagtcgagcgcgagctgctggagcttgccatcgcctttggagaggagcgagaggtagagcgcatagagctcgtccgtccggtagagcgccttcggattcgtgaacttggacagcagctcgaggtaggcggcgagctttgcgtgcagctgcttgagattgagacgcgagccagtgaatacgccaggtgccagctcgggcgttgagatgaacgaggtcaagtgcggcgaccgcgcggcaaaggcgaggaagaccgggacaatgtcgcgcgagtggcgctcggctagcataggcgacgccgtcagcgcgttgacgaggttgatctcatagttgagcacgtcaagccgatcgcgagcggcgggctcctgggactgttgcggtaaggtggacgtcagcgtctcgtcgaggtaacgaccgatagcgagcggacgcacctgcttaatagcctcaaagagcgcgccggtgtcgcgccgaagctcgacgttgagcagctcctcgcgccgcgtgcgaggcgggtcacggaacgagcggacatcctcgacgagaacgtcctcctcgtcctggccgttccattcgcgcatttcgacgccccacacggggccggcggacgactcgacgtcggccatctcgcccgacgcagcgagcgcgagttcggcgaacaacagctgccagatgagcgtggcctgggccgtcggcgtcaaggtggccagcgcggcgtgcaccgcagcgtacagtggccggaggttgacctttagttgcgctgcaagggttgcggcctcagaagcgtcagtgagcgcaacacaggcagaaagacggagaggagggattgaccaagcatggttcgcagaccgatctcagcataaacggtttcggttgcctcgagcgaaccaagcgcacggccgagcttggccacgcgcaggcacttctcacgagcgccctcgaccgaaatctcgagctcctcaagttcgaccgcccgttggaggacgatcgcgcccgtgccgtctgccggggcaagagcgctcaggataatgagggccgagagccggagggccgacgaggaggcgagaagcgagcttgacaggaggggcgcgtaggtcgcgagttggtcggttggcgccgagaggagcggcaggagctgagcgaggccgtggagtacagtcgaggagacggcatgccgctcgagcatcgtcgacagcgtgggcagaacaattgtctggacctccttcttgccgccggcgtcgagtgcgagcaggtcggcgataacagcgagcgtcttgccaaaggcgtacgcgccggccgcgccgccgctggcctggccggtagaggagaaaccctcgagcaggctaacaagtgccggccagaaggttgtccgctggcgcgtcaagccctggaggccgacgagcgaaaggtcgagtagaacaagctcgtcctcgccgagcgcgccgacgtcgaccgaggcgagaatggcggcgagcgcacacgcaagggcctcaaggctcgtcgctggcagctgagagagcaggccggcgtgctggaggtggccgagcagaccaaggccggcgagacactcgcgttcaaagtcggcgacgaccgtctcttcgacggcgggccgcaagaggacgtcaccgccgcgcttccagcccttgccggcgtcttcggcgacccagagaccgacgagcgccttacgcgagaaggggtcgatcgccgtgtaaagagcacggacgagcgcgcgctgcttcagccagtcgggcagattggccagctgaagaagcgacgacgttaggttgaggtgctttgacagcaaggagggcttggccagagcaagaggctgcagcgttggcagcagcacgaggtatttgggcaggagtgaggctgagatgggaggcgggaggcgaggtcagacgactgcagggttcgctcgcccacacgcgccagacgcaccgatgatagccttgccgttgcggaccgtcgtggtgacgcagagggcgctcatccagagcgcgagctggtgctcgtcgccgccctcggtgaccttcttgcccacctcgagcaggacctctagcaccggctccatttggacgatctggagcgacgtgtggtggatgagggcagtgatgacgttcgaaaggacgcgcgcggctgaaacggccgagtctgccggcagggcgagcagctgccgcaggagcgaggcaacaagcgaaggtgtcagggaaggtaacgtgccgttcggaccctggagagcggaggaagagaccaagtatcagctgagcggaagcaaaggttgacagcgactgtaagaggaccgaccttcatggcctcgaccagggcgagcgcgacgccaacccttgactcgggttcacgctgaagttcggcaacgagcatgccgacaagccgatcgccaacctcgccgcggccgccacgacggacgacgttgccccagccctcgacggcaagccggcgagcatcgtcattcgtcgccttgccgcctctgctggcgttcaccaagaatggtcgccaaacagcaaagacagcctcgagcgtctcctttgcctcggatgcgaggaggatcggcgtcaaaggcttgaggaaagccgggagcgggccaaagaggagcgggaggtgatgcgacgagtttccgagcgcaagcagcgggccgatcagggccggcagcgacggcaggatctcgccgagaagcgactttgcgagcgagggcaggagctcaagcaccgctggaatcgcgcccgagccatcctcgatgttggtctcctctggccgggcaaggacggcggcaaaggccctgacgacagcgtcggcgttgaagaggaggagggcgtgcgtcggcaggagcggcgtgagctcctttacgagcgcctggaagggcagcgagaggttgaggagcgagaggtgctgcaggtggagcgtcaacggcgccggaaggagggcggccggctgagtcttggctgcctcctgtgtatcgggtaagcaggtacagagagtgacggcggtgggcgcagcgggcagggcgagcataaagctggtcagcacacggtctctcgctcgtagcaggagcagctcgccacatcgtaattgagcaaagcaggacgtacatcgagctcggccgagaagtctaggctggtcgcggttgaggccagcgtcgagacatgcttgctcttgacgagctgtgcggccgacttgaaggtgtgccgcttctggatgcccgccttcttgaccgccttcttctggtgcgtgaactttttggccatggccggcggaaagggtgcgagaggactctactccgcggcgagatctctgtaaggcgaggtctggcgggggagaagagagaggaagagaggacgagaccgatggacagaaggatggcctgggcagctgccacaaggagtcgcccgcagcagggggcgaggtcgaatttgggcgggcggccagaaacttagggttagccgcgcgcgcgcgcgcccgggcgaggagacgcgacttcgacgacagctcgctcctgactcgcgcaccttcaacccatcgacctttccgtctcccacactcctttcttcctcttctgatcctcgcccgtcatgtcggccgccgtctccttcgagcagcgcacgcatcccaagaccatctgcatgttgtccgtagcctttttgcttgctcagcggcgacgcgcgacgacggctccgcctgctcgctgtcgttcggctcccaaaggtgcttcgctggcaaacctcatctgacccatcgcgtgatcctccgtctgcccccttcttctagcgatgtcgatggcacgctctcgcctgcccggcaggtgcgttctatcctatcacctctgcatcggtcgagctcgccagctgaccgtctcacgtctgcccgatcgcatcgcgccctctcttgctggccgactgctcagacggcctcgcccctgatgatcgagacgctcgccaagctccgcaaggagacggccattgcctttgtcggcgggtccgacctcgtcaagatcgtcggtgcgtcgggactcccccatcgcttcggtcttgcgcttgctgactcgatagctgtcactcgaacgtgtcctcatctggtctgtcacgagggcagagcagctcagcgtcggcggatccgacggtccgttctctcgctttccttccgcgcttcgagggacaactctgacagcctatcaacaccgcgatcgggcccctgctagtcctcaacaactttgacttttgctttgccgagaacggcctgacagcgtacaagctcggtcagcctctcccgtccgagtcgttcatcaagtttctcggcgaggagcagtacaagccgcttgtcaacttcatcctccactacatcgccgacatggacatcccggttaagcggtttgtcttttgcttcgacccgctgacttgcctgaccgctcatctgccgtccttgtgactaactttcaacgctcgtctggatctcagcggcaccttcgtcgaattccgcaacggcatgatcaacgtctcgcccatcggccgcaacgcctcgaacgccgagcgccacgagtttgaggcctacgacaagatccacggcgtccgcgcaaagtttgtcgaggcgctcaaggccaagtttggtcacctcggtctgacgtactcgatcggcggcatgatctcgttcgacgtcgtgcgttggcccaaccgaagcttgcgactcgagaccggagcgctgacaaatgagcgtcgcctcttccgctgcgcccgcaccagttcccggcaggctgggacaagacgttttcgctccggcacgtcatccccgagggcttcaccgacatccactttttcggcgacaagacgtacaaggtgcggctcggcgctacgatcgcttgacatgtcccttctgctgacgctagtcaacctctcttccctttaccttgcgcgtgctttgcagggcggcaacgaccacgagatcttcgaggacgagcgcacgattggccacgccgtcacctgtcccgaggacacgatgaagatcctcaacgagctcttcctcgctggcaagtaaagcaggttggctcggatcgacgcggtgaccgccgtcttggctctgcgccgggcgcgagtgagagtacaccgctgtccgcttcttttgggtatctcatatggccttttctggtcttggcgaatcgcgctgttcgaattggtcgagtgttgagaactggagctagaaggagcgacttgcatatgagtcgcgtcgaagggtccatgacgcgttacccctggcctgcgcgcgatcttcagcctacccgtacctccgaccacgacttcaaggcttgccttatcaacgctctctctacccagtgttcgatcggaacacagtcccagttctatacgcctgccgccatcatgtccgactatgagcaggcccggctcgtcaacatcgccgccaacaaggccctgctgagctcgctcgggatcgagccggtacgcgctccttccctcgcagcgcgcgctcggtcaaggccagctggccttccttgctcgtcgggccctgacctctatgctctcttcctctgacagcgtccagaggttaaaccgcctaagctagagccagagtcgaagccgcggcccaagaagcgcaaggcgtcgccctcgggctcgagcaacgcttatcacctgctcgcgccttcgcgcaagtcgtcgcgcatctctggcattccggccccgtcatacacgggcgatggcgcccagttctttgacgacgaggacactggcggtcggcgtggtcggttggccgctgcttcgtcgacatcgacagggccgtcgatcacgcgcatccggcagctcccacgcgcaccctcgccgccggcggcgaccgtcccggacgagtatgacccgagctacgtccagtccttgccgacgcgcgacgcgggcgataagggcacgttccggtttgaggcgggcttcgagggctttacgccaaacgttgcaccgtgggaggtcatgcgcgagggcagcttcggcgggacttactggcggtcagtccaacgtcaccgatcctcgtgaccagaggccgagctgaccggcctccttcgctgcagacccttctactcgcgcgtaaaaaaggaacagattgagcccgggttggatgccttcccggccgagtggttcgacccgccgatcgacagtgagtcctggccattgaggagcgcagcatcacgagtgcacgatcgctgaccgctttactgcttgcagccgagtcaaacctgacgtcgacaacgtaccggcccgaaattaatcgctacggcgtcaaggcgtcgcagagcatcgaagagtgggaaaaggccggctggatccgggcgaacgcgccgcgtggctggatggaggtatgtcctagcctcgcagtacttgctcaaccccagccgctgacgccagactccagtggtactgtcacttcttccttggacgccggtcgttcgacgaccaccggcagatctcgcgctggaacggctgcgccggcccgcgaggacgcttcaagacgtcgctcgtcaaaaagattgcgcaggcgggaggggtcgagcacctcgacgacgacggggtggcgccgatcctgaggcagacgctgcttcattgggcggtcgagctcacgcaggagtcatttgaggcgtacctggcttgagaggcagcggaagaggcaagccttgcctgcggttgatgactgctcgcctgttgtcctgtctggccttcgcccgccgcaggcttcttgctgctctgagtcccactcaagctcatgcagagtagacgggaggccgatggccttctcatcggctaccctctgtgcttcgcttatacccgttcgcggcttctccgccgatatccttcaccttatccccctcctcccagctgaagacctcctcgccactcatcttcgagctgaccgagcggactgcttgccggctcggagcacgcgagtgcccgggcgtgtcggagctgctgccaaccgcgccgctcgacggcggcacgggcgtcgtcgtcaacggcagggcgcggtaggtgttgtgccggagatgagcggcgaacgagtagaggatgagggcgaagtagacctggagacaaagaggggatcgactggtcagtggggtacgtcggtcgaaagagcgaagcgaaccagagtggtcgctcaccttcatgagccagcacgccagcaggacgaggacggccgttggcttctcattcccccaaacgagcgccgccgctgccgcccggccctcgtcgtccattgcgagctcatccgccgcgatgtcacccctgctcttggccagtgcgaccatcgcctcctgggcggccgaattgaggacgcggtggccgtcatgcgggatgtaggtccaccagacgacggcgaagaggagcgtgtagagggtcgagatgaggtggtcgagcaggtagagatgcgagagcagcagaacgcgtgacgagtgctcctgtacaaggccaaggcacagattggcgaggtcagcggctgtcagaggtagcgagagcaggccaaatcggacctcgacgacggcattgaggccccagacgaagccggcgagcgaagcggtcgagtagaggtagaatgagagctggccgacggtcccgccagcaaaacaggcgccaaagaggccatagacaccggcgaccttgttgaagagctgcgagggcgagcagataaagggtcagggatgatgagaggagccggtgaaggacgcgaccggcggtcgagctccagccgggccccgggaagaaggctggatcagaggttcagacttacgccaaagaagatgacgagcatgacgcctgacagtcaaggcaaagaagacgttcagcccttgttatgcaagccgccttgagccgttgggccagcatcgcagcacagagaccctggcaggtcgacagaggctcggcgaggacggcgacgcaccttgcttcaggtcaatgacgccaaagagcgagtcaaagagcggccggttgaggattgagatccgcatgctggtccggagagctcgggtcctgcttgaggttgagaagaaggtgaggctgactggctggacgttccgtcgcgacaggaggacgaacaggacgaggcggacgaagcgaacaccgaggcgcgggcgcgggcgctgcgacaggctcggaaggcctgaggctgccgctgccagtccagaggacctgtagccgccccccttgcaactctcaaactcctctgtcgatagcggacgaaatgagaatctggatgaacagtttgagcgaacacgagcggcgactgatgtggcagaaggagtatgagagaagaggcaggcagggagacatccctcgagctctgcgcgcgcgctgccgctgcttctcgcgcccttgtgctcgtcggtcgcgccctcccgcttgcccgtcactccctactcctcaagctgacccatcgtacatcgctgctcatcgacagtcagagggcaagcgcagacatcagccggtccaacatccatgtcggacccgcccccgcagtctccggcggggtcgcctccgtcgccagcgaccgcaggcaagacggtctcgccggtcggccaggtccttgtcgcgtcgccggtcttgccaagcacgacggccggagccatcgcagacgaggttcagccggctcagccaattgtcgctgctctcgcaccgaccggatccgctgatctcagctcgctgctcgcgccgctttccgagccagatgctgggccggacgaggtgcgcgtgcgcgcgaccgaaaggcagccagccggcgtcgagaggtgcgcctgcctgcaccccctcagctagcagccgccgtacgcgagagaatccggcgcaaggaagctgaccataagtatctggcccttctccgctcgctcgctgactctagcgaggacgtcgagatggcggacgctgccgcctcgagcagcctcgctgccgacctaccggccgccgcggacgcccctcttgtcgcatccgccgcctcactcgtcaccacggcagctgccagcgcatcgcagccagaagcggagctgttacctgctccatctccgccttcggccgtgaagtcggccacgcaggaggaagatctgaggccggcgccgccgcgggaagaacaggcaccgcagcagcagcagccggcaggcacccaaacctctccggaggcgctgtgcgtccctcgccctcacagcgctgtccttcgctgggtcgctgacttcggcgctcgttcgaacgatagcgtcttgtttaaggggccgtcggatgatgacgagatggcttccccggaccggccggctgagacctcctctgggccgcctgtcgtcgcgtcggtcccgaagcagtcatcgccaccctcgacgccacttcccgctgaggaggaacggcccgatttggttccttcgccagctcctcagccagctggtccttccgccggcaactcggctggccgtccgctgggcgtcagcgcaccgatcccgcctttcgcaccgagcgctgcagcaccgacgagcctgctcgcttcgatcagcacaagtgcgctctttggcgtccaggatcccaaaatggtcttggtcgaccgaccatctgctgagaccagtgcgacagcccgagcaggggcgtcgcacagcgacggtgctcagccgctttcttccaccggcagcagtcgaccggtgatatcgaatgcgtgcgctttcaatcaacttccttatctcttgtggtacgatggctgacgtcgttgaccttctgcctagcagactcggcgcgaacgctgtcgcaggactctctgccgccggcgccgcagcgacgccggctgacgcttcgagttcaggacccggctctgccgcagtcgacgcggcaccgcccccgccgtccgtctcgacgatcgcaggccgcaagatccgcacgttcccgccaaagaagcctcgtccggcgccggtaaccgcgctcgatgctgcgaaggcgtcggcggcgaagactaccagcgtcggcgggagctcggtcgcgtcctctgccgtcgtcacgccacggagcttgagtgctggcctttcgccgcccatcgttcaggctgcgggtttcgctcagcagctagcgataccgtcgcctgcagccgcaacggccgtcacgccctcagcgatccctttggtcgcacaaacgaagtctgtcgtgtcggttcacacgcccgctcgaccgcttgcccccagcttgctggctgctacgccatcggttgcagccgcacggccgcgacctcccacaatcgggactactggcaaggtcgctgctttcgttgcctcaggccggcagtcgccttccgccattggcccacgctccccatctggtgcaggcccatcggcgacttcgacagggatcgcaccgggcatccgtgggtcgctgatcgacgtccgtatcgcttctgacggctccccgatgatcgctcgttcggcgccagcacccttagcagccggtcctcgacctctgatgccgcctcagccgatggcagtaaatcagcagcgaccagctgcgtcggggccgccattactctcggtcgttcgaccggtcaaagcaattccctcgccgagcctcggctctgtgcctgcagctgcgacgacgcttgtcagctcgtcaccctcgggtcccagcagcgctgccggcccgagctctggccttgtcaacgctgtcgcgggacccagcaccgcgccgacgccaacgcgcacgccggccgagattgccgcgctcgccgacgacatcttccgcaagaacctagagcggctcgccggcctgcgtgcgggcgaggacgctaaggcggttgctcggatcgagcggagcgagcggaagaagcgcaaggctgaagagcaggcggccaagcgtgccgccaaagcgcagcgcaagggcgagcgagatgcccggagcacgagcaaggccaaggccaagggcaaggcgccgctgaagagcaatggcagtggcagcggcgacgataacgacgacgacgacagggccgccgcgagcgatggcgatgacgagtcgagtctcttcgcctgtaatagcgaggctccggcgccagctcgatctccgacgccgccgccgctgccgccccggcgagatgttgacggcaacgagatcccgcgtcgcaagatcggccggccgcgcaagtcggaaaagggcgccggtagtgatgccacgccggcgaggtcggcctcgaagggcaagccgaagcagaagaagcagaagaacatcctaatggacgcgacattcatgcctccggccgatctcttcccgtcggatgaggagccgcttgacgaggagctcatcatggaggcctggccagcaccgccgcctccgagagtaccctcgccaccgtcgtcgccgccacctccgccgaaaaagcgtccggccaaagccaaaccgacggcgtcggccgctgcccaactgagctcgaagaaggcgtcgactgctgccgctgctgccatcgccctggcacctctgtctgggtcgagtggcagctcgaggtcggcttcggccgctccagctccagtgccaatccggaagcccgtcacgtccgccgctcggcctgtcagtgccgccgtttcgcccgcccgggtgcccgagccgactgtggctgcagcgtctccgcccccggccttgccctctgccccgccagcttcgagcgcaccatcagctgccgctacggtcgaggaggacctcaaaccgattcgcgttcgtcggcgcgctctgccgggtatctacgtcccgccgctgccaaagtcgcgcaagccgaaggtgccgaccgaggtccttgtcgagactacgaccagctccgatcggccggccgatcctccgcaaacttctttgatcgatacgccaacgccggcagccgagccgggtgcgcccggagagccgtcgagcgcgacggctgcgacggctgcgaccaatgaacccccctcgacgattcctgcggtcaacgaccagactgtcaccgcggacgacgcggccggcgccgaggttatcgaggcaccgagctttgtgcagaaattcgcgtctcctgcgcctgccgtctcgccgccagcggctggaccacctacgtcgtccgagcgtccggccggctcattgtcgccagcgtcagcctccggccggcaagacgaagggctggacgcttctgcagacttcaccctcgacctccctttcttctttcattacggacggtcggtcgccatctctcgtcgcacgccgaccaagaggcgagtcgcgcccgtcacgacgcctttagacgcggcgcagatcgagagggccgatgccctcctgaagccgacgctcgctcccgcctttgaacagcccgcttcaaccgtgccagttgaactcccggctcaggctgccgctcctctgcctcctgcgccaaccgccacagcacacttgccaacctcagctgtcgccgccgcctccccaatcgccgcccaaactgacttgcagacgacctctggaccgatttcaccggccgcttccccggtccctccgtcagcgctcaccccgccggccgcgactccagtcgagccagcctcaatgcagccgtcgctcgaatcgctcgtcgacgacaacgacctggtggacgatgccgatctcgcgaaggcacccgctgccgctcacgtggaggtgtccgagggtgaagagaagcagaaggccaagatccccgggtcggccgacgtcaacatggccaaagcagacgaaacggacggctcagtcgccagcgccgatgccgacgaatcgatgtgggaggaggacgtccttgcaatcgagcaagcggagccgccacccgacgaggaggagctcatcatggaggacgaagacaaaggcgagatcgaggtcgagccgccggccgcaccagttgctgccagccccgccgctcaagccggccccgccaccccaaagatccagtccaagcagccctcgccggaggaagagctcaatctccaggcaccatcgccttcgccctcgctggagcctccctctcctcccccgtctcgtgcgccccggccatcggcggcagcggaccgcgacgcccggccgcgctcgctcgcagggttcgttccgacggcctcgatgcggcgcaccaagcaacaaccggagcctgagcctcaggctgtcgtccagagcccagccaaggcgccagatattgtcccgaccgcgtcgaatcgccgtaccaagcccgagtctgcgccaccggtcgctaccctggccccctcgtcctcggtcgccgagacttcacgccgggccagttcgcgctcctcgcgccctcctgcgaagagcaaggctgaactaattcctgcccgccaggcaggtcgcaagaagtcgtccgtgttctcgttcggctatgaggacaactctccggccgaggtcgccacccggagcttgagcccttcctttagggttaccggcgcggacgacggcgagatcctgcaggccgcccctgccgagggcggagcgcctccggcagatgctcaggtcaatggcgacgccgaccaagctgaagtcgaggcccccgcggcccagtccagcgacgatgatctgctcatcgtggaatcgacttcacctcggccgccttcgccagcaagggactcgttgccgcctgtgcgggacactgaatcactcgtcacctctgcatcggctgctgtccccgttgcatcgcccagcaaagaggcggccgagcaggccgccggcgagttgacgaacgcggacgccgacctgcttgtcgtacagccagacgaagagcttgtcgtccaggcgccgcccgagatggagccatcggtcgccggtccggaccagcagcctctccctcccggcgccattgcctcgcctgctgctgccgcttctttcccagctgggactcctcccgcggcatccccttcggccgacatcctcccctcggcgtctttctcaaccgaggctgaccctcaaccgcaggcttccgccgccgagctcaagtcgccatcgccatcttcgcagcggctgctcaaagcgatcggcaaccacaattttgacgaagaagagcgcatcatgcacccggttgacggctcgctcaaccttggcgtcagcctgccagctcagttgacggctccgttgtcgccgaaattggcggccggcgtcgactcggacaacgagattcaggtcgagctcgaggagggagcggcggtcgacagcgtcgacgagctaccgcccttagagccctccctgacgccatcgcgcaagcgcatcaagctcactcacaacgcctgggccgagcgcgtggacggccagggcgcggccggcctggccgacgaactcatcaagcaggcagagagcatctcggcgcaggactatgtccgtctcgccgcttctcgttcgctgcccttgcgacgacgcaattgaccatacgaacccttctgaacccttctgacaggacaatatgtgccagatggactctggctgctcgtccgacagcgagcagctgacgtggcagcagtgggagggtgcgctcctcgcgctgttagtaatttttgccgccgtcttgcccgctaaccgcaagtttctccttcccgcacagatctcaaccggccgtcgagggaagaggccgaggagatgacggcctacgtcaaggagcgtggtacgtgctaggtcgcgtgtccgcgtgcggcagcccactgacgcaaatctgcccccttgacctcggctaggcgcccagcacttcattcaacactacatgcgcgacaaggaagttcgcatcatccggcttctccttgctttcgacgtcaaggtggtgagtccgcctgctgagaaggtcatttcgagcagggcagaccgctgacggctttcgtcccgtcgcttcttgcagacgaagagctaccgcgacccgaaccttgaggactatctgctcattccggtgctcaaggtggcgctctcgaaggtgtacgtcgtcgatgccgtccatcagtggcctgatcgtccattgttgaccgctgcggcccactttgcgacccgcgcagcctctcgaagcgcaatcggctgcctcagtacagcacgtgggacgacgccgttaagctcatccagaaaagccagcggatcgtcgtcctcagcggggcgggcatcagcgtcagctgcggcatcccaggtgggtctcgctttgtgctagctttctccgagtcgtcgatgctgaggcccctcctcttttcgacgcagatttccgcagcgtagatggcctctacgctaagctgcaggatgagggccagtacgacctcgaggacccgcagcagatgttcgacatccgctacttcaagaaccatcccgaggtcttttactcgttcgcgcatcagatctacccgtccaactttacgccctcgccatgccatcggtggatcaagacgcttgaggacaggggcaaggggcgcggctttatttgcccgacgggcaccggacctagagctaatcttccctttctcctccgtccttgccgtctccttagctgcttcgtaactatacgcagaacattgacagtgagcccgccctctcggctaggttggtcgtccctgagcgagctgctgaccactgactgcacctcgtcgcagccctcgagcacaaggtcggcatcgagaaggtcctccagtgtcatggtacgccggtcttgcgcagagggagcagctctggccagcaaggtgctgaccctggctgactggtccctccgcacaggctcctttgcgaccgcctcgtgcctccgctgccgccgccggatgccgggctccgagatcgagtaccagatcatgaacaagctgatcccggtctgcgagccgtgccagctcgaggagaaggagaagatgagcaaccgcgtcaagcgccgcaaaaagtcgaagaagaagagccgcaacccatgggccgattcggactcggactcggacgacatgactgacgccgaccgggtctgggccaagaagctcattccggcgatcatcaaggtgcgctccccatcccgggcgcttacaagtctgtcgacgtgtggactgactgttggcccatcaaagcccgacatcaccttctttggcgaggagctcgacgaccgcttcgacaagcgactccagattgaccgcgaatctgtcgagtgagtgatcctgtctctaaagtctgagctcgtctgctgaccagtcctcctcagcctcctgatcgtcatcggcagcagtttgtcagtcgccccagtctcagacctgctcggtgcgttcttcctcctagagagttctgcggacgcatctgacctcgcccccaacttggctcgtcctccagcggtcctgccgcactcggtgccacagatcatgatcaacaagacggcaattcgcaactacaaccccgacgtgagtcgcgcctcaactcatccgccgctcgaatgcctgcgtgactgactcgcctgtctactgcagatctaccttgtcggtgacgccgacggcatcctcctcctgctggcccagaagctcggctggaccctgccagcacccaagggcggcccgcgtgccatcagcctcaaggccgagaaacctgctgccgaaccgcgccagttgggcaacacgtacgtcaatctggccctcactgtcgtgctgtcagcgggtcgggctgctgaccttcttgacccatccttcagcaactactggatctttaagggcgcgtcccggagcgacctcctcggcaccgtcattaagactctgccgaaagacgtcgacgtcagctgggtccagtcggacgaggaggagggcgagggctccgacgacgacatgcttcagttcgagagcgacgatggcgagcatgccgaccccgatcaggacaagcaccacgacgccgccaaccgcgaccgcggcctgtcggaccacgagctgccgagtgtgcggcgtcagtctcggtcgacgcgttcaaagggagtcatcgaggagaacaccattgaggaggtgcctgacgacgacctcttgcccgcggcagttgaggccgaacaggagcgcgcgcccttgcccatcgagttttcgtcagaggacgagacctcgaacgacggccgtcccgtctgggacctgatcgagtttgattcggccgacgagcgagctccggtccaaatgcaggagccgaagcgcgtcccgccgaagtcaaaggcagcggtgccggtcaagtctcaggctcctatctccaaggccgtgcaaaagaagccccaggcggccacgacggcgacccccatccggcttccggtagaaccggagccggaacggccagctccaccgcctgcgcctgcaacgacagcgcttgtcgagtcggacgacgaggaaaatgttctcgtcgtcggccgctaccttcgctcgtcaccggtcgagccgccccgccgaccactggtgctcagctcggcggacggcaagcgcagcgccgcgctgtcgtccagatccgactctgacgacgagctggctctcaaaccggcctcctcgacgcccgcccggccattggccagcgtcagcatctcggccgccgccaaacgaaagcgccgttcgagttcgcccagagccttgccgcagcctgtcgccggcccttctcgcccacctgtccgggcgccgcaggcgaggccgccgccacccccaatttccacgcggcggtcggcccagacaacctctgcgcctgccgctcgaccgtcttcctccagctcgacgacgtcgatccctcagccgtcgtcgacagctgctacaaggccgggtccgccgaagccgccgccaccgccgcagctcgtcaacttccacaagattcagcggccggcggtcgttatgccagccgcacgcagagagcccaaggtcgtcgagctcgtctcggacgatgaaggcagcgtcgtcatgatggagtgatcggcatcttatcccgatgaatttgcatcccttctctttcgcagcctgtgactgtttgtcagcgagggctggcagcagtccacagaacgcaggcgcacatgagatctgccgacacgcctcgacccactcaggcatgcgcacgcaagccgagcttcacttccgctctgttgaccaaccagcagcgcagccgtcagccagtgagcgacgagccttggacgtgtgcgagcaactgacaaagcgcccacgtgcacctcgacttgctggatctcggcgtcgatgatggcccgcttgctgcggagggcagcgaggtcgtcggtcagggcgtctgccttgatggttctgcagggtcgtgtttaacgatcagcaagactacagacggcagtcaaggcaaacgtgtcaggcagagacgcacaggtcgctcgagtgcttgacgccgaggaagcgttggagctcgacccttagacgtcaaagttggtgcgggtcagacgccaagcttccttgcactgacgagtcgctaggtcaactctccaagctgacgtacaggcactcggtgcggaagagacgaagccagtcgagcaggacgaggtcctggctgcgaagcatctgcaaagaggggcgtgcggaaaaagcgcagacatttgaaccgggtcgatcagcttgacaggtaaggtgaagtggtctcgcatggcacggacggcttaaccttgaccgtgtggaacgtctcgtcgagcagcagccggattgccttgcaggccgcagcgtacgtctgagcgtctgcgacgagcccttcaagcggccgccgcgttgcgtcagttggagcgcctcctggagggtgctgtgacgacgataggcgacgcacctgacaggcgctccttcttcaatgaaccgacagaagcgtgagcggcgaccgagttctgcatgaaggctcgccaggtggcgatcagagaggtggctgccagcttgtcgctgatttggcagcggcagcggttttcgtcagcgccctcgttgatgtcaaggtggcagcaggaagaagacagacaaggctttggcccactgctgctgctgcagaagctcagctacatcggtcagaagagggagccagagataggggagaggaaggtcagctctcctcatcggagaaaactcctgtcgacaccaagggcagacaggcagctcggaggtcgggcacctccggagctactctaacgacacgcacccgtctccgcaagcttgtcaaagtcggcggccgtgtagattggcatcgtgatgggtcgctcaaaagaatgacggtcaggggaggcgagctgtcggcggtcgctcaagctggtcagccaggcggaggccgtcggtcggtggctcagccccagtcgtgacgaagaggggcctttatcgctcgacgtctggtctcgactcgtttccttcgaaggcagcgtgtacgcagagagggaggcgcaagactcggcagattgtcagagtcgactctcactcggtttgtacgtctcgctcaggcagtcgtcgagtcttggtccgacccgacagacaccccttttctcgccttggttggcgtttcaggtcttcgaaatagaggcgggactccgtcttggctcggagccggcccaccgaggagcgttgcgcaagggcggggacaaagcgagcgatctgcacgacagctcttgccctcgaccatcatcgcttcctcgctcagtctagacagcagccatgcgcctcctcaccacccttatcaccgttgctgtcctctcgacgtcggccgcggccttcgtcatcgacacgccacaaaattggacctcgaccggcggcgtcctctcgtggaagactgagccggacgatcctgcttccttctcgctcgtcattcgtgcgaccgcctcccgttccttctgcccctgcccatctctcctgtctcgctgacttgttcgcctgcgggatgattcctcctgcccaggtggtgtgggagtgaagccgaacgggggcaggatgacgggccagttcctcggccgagccgactctcatcctcacgcctacttcatcaatcagacgaccatccgttcagacgcgtcacccgtcgagctcaaagccttctacgactacctccttccgagcaaaaacgatcctcgctgggatattacgttcatcgaccccaacgtcagcatgctcaatagctcgagcccttttgccattgctccaaacacgaccgccggctgcctcatcagcggaccgcccttgccggctacggccgctccgaccggcggctctactagttcggggaggaccttcctccacggcagccatccgtctgaatgagcgctcacgtcgccctcatctgccaaattcgttcgaatgcaggccggttcggctaccgtcggcacgctctcagctttcacgcttgccggcgcggccgcgctcgtcgtcatcggtgccgcgttctagagtgccgctcaagatcgagctagtcgtgaaatcgcgagccgctgaaggagaggcgacagtccctggtcaaagggcagtgttacaggactcattgcaggtcgacgggtcgtaaaggtggagcaacgaaatcggaatgaaggagggggccgcagccgagagatgaagggtgacaacagtacagccgggccaaagcaatgggtccgggcgtaaataagtagagacggtatgagacaagacgagacggcggtagaaggaagggagccatcactcgagcgcgagcttgaggcgcatctcagacatgtagctctctacgtcgggtcggttgaaggtgagtgtcagcaggtacgctcgggcgtttggcaacgacgcaggatcaaggacgaaccgcagtgcgccctaagcttccagtactcctccatgagcgcgttgacctcggcctggttgcgagcgataaaatcctcgttctgcattcggcgagcagaggtgcgttagcaggctgaagcgatcagataggcagtcagaaagggccacgtacctcgagcgtgagccgagcaatctccttctcgcgcttccgctgggtcgcgtcgtcctcgtcccgctcgcgcttgatcacctcgtagtcgtcgcggagcctcgcgatcgacaggttgaagcgctccttgcgctcagcccacgactcgcgcgcgcgcgagagcttgtcggtcgcgttggcgagctgggtcgcgagctgctcgagccgcgtctcgcccgactggcgctcgatctcggtcgctcgcagccgcgcgtcgaggccttccttctgcgccgcccggtcctcgatctcctccccgagcacctcggcttgctgcatcaactcgatcacaccccgcatgtcctgtgaatggcgagtgactcaggctcagcgggagcgtttaccgggaagtaaacaaagagaacaccgcacctgctcgccctgcacgatgagctcaagcctggcgccgaggtcgcgaaagctcttcagggcgctgcctaaatcctccttctcgcgcgccgtattggtcgagagctcgccgatcgtccgccggatccgttctggcgaacggacgaggcgcgagcgttcggcagaaatgttggccgacagcgagttggtcgacttctggagttcgtgctagtgcggccggaaggaaacgtagacgtgcggtcagcgtccgagacaggcaaggcctttgcaatgagctggtagcgtaagcgcggacgcacgtgctccttcttcttcgcttcccgttcccgctcagtctcgacgtaacggtcggtcaggagtttctgctgcttcttgagctcgccgagctcgcgaaacaggatctcgttgcgctcgtgcgcggcggtgatcagcggcttgttcgattcttgcttgtccctgtgacgcgacagaggcggagtggcgtgtcagtggcagaggctggactctttcaagcgcctcaagacgcacttgagttgctggagctgaaacgatatgcgagcagcctcctcggccagctcggcccggcgctggttgatttcgtcgccccgagcgacaagctcctcgtacaagcctgaatgcgacagcctgcagaagagtcaaacggatcagctcccgatctggacaatctcagcaaaagactccgcgggcagcgcacttgaacttggcaaagttgatgacggccgagaagcagtcgcagacgcgggcgtgctctggccgggtcaggtcctggagcgtgaacgtctcgacgccggccgtcttgacgagccgcttgacgtggatgaagaacatctggaggtggagcgcgtccgagtagagctcctggtggttggggccggcgagcagcgaggggcgggtcgaggagcggaggcgcatcgagcgcgtcggagggaggttgagaggcgaagtcgggtgcggagggaaggccgggcaacagcgtcagctgcaagcacaagatgggctgttgcgggcacgagaaaagttccggtgcgagccgggaatgccagacggacgaaccgggtaggtgaccatgctaagcatcgcgccctttggccgctcgagcccggctttgctgacgccggtaaaatagtggagaacggcgctccagatgttgcgaaccatcggtgccgtcggccgcttgagatcctcctctgatacgttggcaccgagctcctggaggcagtcgacgagctcctgggtcggcagaatcggatagccgatcgacgtctgcttcggcggcgggtgcttgcgcgggttcggcagcgtcgacgccgactgcggcgtccgtgaggacgaggcgtacatggcgagagacggtggcagaagtcgtccagccggaggattgggatgaccgtctgctggattggggtcgtcgaagagtcgtgtaggggcaggagagcgacggcaggaggtcgtcgtcgtcgtcgtcgtcgtggcttgttggccgaaacgcgacgcgtcgaggaaagcccgaacgagcccaatcggtccaggctgaatcccgacttgagcccgcctgggcacgtcctggtcgaggcaggtcgacacgctctcgactgcatctcgccctcgtggctcgaaagccttgaagtcgtgaacggcgacgagcaaccgagcccgcccatcgtgctcatcccggtctcatggatgcgctcgctccggacgctggacatgacgctcaccgacccgtgcgtgctgcacgaaacgcctcactcgaacctagagacgctcgagattggcctgttcgagacggtcggaatcgacagtctcggcaccagccaagatgcgaccgacgagaggctcgggttcttcgatggctaacctttgtgcgtcttcgtcgagcgtcctgcgccgtccagcgctcgtctccatcctgtttcccggcgctgcgcacggtgcgcctcatccccgactggcgcgaaaacggcgtcgacttctcagtccgttgccaacgagatgaccctagcttgcaggcaatcgggcagcagctcgaaagtgtggaaggcggacgtctgacttcgacgggccgtctaggacgggccggttgcgccgctgccgcggatcccctctgcatgaccttcacctctgaccgatgcgctgcgtgctgctgtgtaaggcaaagggatctgctggacgtgtagcgagcaggacagagcgtcgaggtcgaattgcgcaagcccagcagatgcagcgagtcaggcgtacgggtcgacggcgagcgccgacggtcgtccgcgtgcctcgctcgcttgcttcagccctggtccctccgaaccgatccatctcctcctccatcaccatcaccaccaccctttatccatcagccgccatgttcggcgagaaagcaccgctcgctgacgccggcctcccgcccccggcggccgcccagcctgtgcctgctccggcaaggagctcgcgaccacaccgggccctccttctgctcgccctcttcgtcggctggcaggccttcctcggcccagcaatccgaagcgcgacaaacgacgagatcaacgtcagctcgtcctcgagcagcggtggcggcaaggccggcgaccagacaaagtgggcgccttgcgagggcttcgagtcgaacgcccgcttctcgtgcgcgacgcaggaggtcccgcttgaccacgccaagggcctctctggcggcgcggccatcatcgcgctctccaagtacagcgtaccggacgacaagcgcaagcagaagctcggcacgctcttcgtcaacccgtacgtacagaggggggctggagggccactctgtctactcgccgcttctccaagctgcttcgggctgaccactatctgtcgtgcctcctttgctgtcgatctcagcggcggtcccggtggctcgggtcaggcgtatacgttccgtgccgctcccgccttaagtcatgtccttgaggaccgatacgatatccttggcttcgacccgcgcggtatcgtgcgtcattggcctcgttcgttggacgttctgcaccctcactgacctgtcctcgttatcctcggtcgtctatcgcggtcaacagaacgagacgctcccgcgcatggcatgctttgagaagctccgggccgagcgcgactttctcaagtcgctttcgccctcgctcgactcgctcgacgtcggcaccgagacgtacgtggcccgtgtgcgcgagaaggacctcgagaaccagctcatcgctgagcggtgtgaactcgaggctggtgcggcgggccgtcacgtgcgtgcctcatgctcgccttgcggttggaccgccgaccacctctttgaccaacccgatgctcctcgcagatgggcacgacgaccgtcgtccgcgacatcgagtacctttcgtcgctgatcgagggcaaggacgcgcccatcaactttggcggctggagctacggcacagtcatgggccagtatctcgtctcgatgttccctgaccgggtcggccgcgtcatgatcgacggcgtttgcgacatcctcaactgggtcgagaagccgcacgaccagtggggccgctcggttcgtacccctgcctagcccgaccgcacccgccgctcattctaatctccatcaccgcgcttgcaggattttctcgactcggagaagacgttctcggccttcctgacctcgtgcgctgctgccggcccttcgcgctgtgccctcgcccacgccaactcgacgcacgactcgctcctggctgccgtcgacgagacgctcgaggcgcttaacaagcggccgatgatcatccgcgactgggagggcaaagggcttggcctcttgcgtggagccgacgtcaagggctggatctttggcaagctttatcggccggccggctggggcgacgccgctaaggttagccgctcgcgacaacgaatagtggcatccgcgactgacgatgagatctgcttctctcaggacctcgatgccctgctgaacggcaacggcagcgcaatttatcagtctggcgtccttcccgcctcgacgcccgcggatgcggagggctcgaccgcctacgccaacccggccgtcgagtgctcggacgccgcgccttaccccgacaacctggatgatgacgcgatcgtcaagctcgtcgccgaggagaacgcttatcaggtcaagcacatctcgcgccactttgcagcagccggcgtctcgttctgcccgcggtggggcaagatgcgcgagactgagcgtgtgcgcccgagcccttcgagggacgctctctaccaggctgaccggtgccgttcctatctcagtacgccggcccttggaacaagacgctcgcccacccgatgctcatcatcggcaacgaggccgacccaatcacgtctggtcgacacgccgagctcgcccacaagatccagccccactcagccttgatccaccacgagggtttcggtcactgctcgacggctcagccctcagtacgtttggctgttcaacccttatccttcggctggactgaccacgctctccctctctctcacttgcagctctgcaccgccctcgccatccgcaactactttgtgcacggcaagctgcccgaggacggcctcaagtgcaagcccgacggcatcctcttccctgagctcgtcctccaggaagctggcgccttcgctgcgaacgacgtgctgagtgcgctcagcgtaaacgagcgcaacctcttgcaggcgatgggcagcgtcggcgacgccctgcacgatggcttccgtcgaaccgacggctcctggggcgtttaaagcagatggcctgctcgatctcggatgattctttctgctgccccatggtccgggcgagatgtgccgactgaagtctcgcagcaatcgtattattcgtcggctctgcaagcctctgagatcagcaagttacagccttgtcttacgctgctcgttcacgctcggccgctccggaacgacgcgacgccggccgagatggacgagcgacctgacctcaaccgcgaatcgaccagtccatccggcgatccgtaagcagcagccagcatcgagacctccttgccgtccggaacctctcgcttgagtcaccagacgcttcgtaggccggccatacctttgcaccgtcccggtcagccacctgttgggctccctgcctccgccctgcgccctccctccgaaccgtccccctccgccggctgcctcggatgaaccttaacgccttctcgcagcagctcttctcgtcggcgtcgtcggcctacacggccctccagggtaacgctgccgccaagcaaacggccaacgacaccatcgtcaagctcgtcgagcgcgtccagtcgtctgccgtcgagggcggcgagggcaagcgggcgtccctcgtcggcctcaagagcctcgcccgcgactggaaggccgacgtcggcgcccagtccatggacgttctcatccagacgctgctcgacccggcgaccggccaggatgccgagaccgagaaggccttacttgagacgctcatcacgctatgcgaatcggactttgtcgaggaggacccagccgtcctacgcgtgcgtctttggcctgcccatgctgtcgacccacatgtcgccacccccagctcattcagctgacgagccataccacgcgcgccttgcagcccgccaagacgcccgatgtcggcctccagctcacgtcgcagttcctcagctcgcccgagacggtgcacgttctgctccaatcgctctcggcgaaccagcacttctacgtccgcttctttacgctccagctcctgtcgacactccttcagaaccggccagaacgcgtccaggagctcgtcctcgcaagcactggcggcgtcgctggggtcatggcctgccttgaggaacgccgagaggtcctccggaacggtgcgtggccatcttcacgtgctgcggcctagactccgcagacagctgacgcccttcaatcccttcagaggctctgctgctgctgcacaacctgacggtcaccaacgccgacctccagaagatcgtcgcttttgagggcgcgttcgagcgcctgctcgacatcgtcatccaggagggcggcgtcgagggcggcatcgtggtccaagactgcctcgccgcgatcggcacgctcctgcgctacaacacctcgaatcaggtgcggaaaaagatctgcattacgagcgactcgtaggctgctgacttgtcaccttcgtccgcagaactactttcgcgagctgtcgctgttgtcgaggttgccgccgctgctgtcgttcccgtcgcctgcgccgcctccgtcgcagccgccgcccgacacgtttgcactccaattctggccatcccagaaggctgtcaactcggcccttgtcatttcgatcgcccgcctgctcgctggtggcggcgacaagggtgggtcgggcgcgctcgcctcgtgcggcatgacacgctgcctcgtcgagctcgtcggcgggagcaacgcgccgacaccgctgaaagcccaggcactcgccgcgctggcagccgtgctcgagaagagccccaagaacgccgagctcctgacggcactcgcgccggcgccgcttgtgccgctcccgcccgacccagagcagcctcatgcgggtgtcggctactcgcgccttgcaaaccggccgttcgtcgcgatcctggtcgagctcgctgtcgatggcgaagcgcggctcgaggaggatgaggagggccgggatggccgaagggtgcgcagagaggccgcccgagtgtgggagatcctggtcggcgtcgaccgctcagtccgggaaggcgtcatcggcacaatgggcaagcctgtacccgagcccaatccgaacgacgagcaagaaggtgcgtcggctctggtcatcagccgagtgcctgcgctcacttctcatcgtgccctgcgccttcgttcagtcccaccgacggccggtgcccttctcctctctgctctcaccgattttccgacaccgacgtcagacgcggaccgaccgctgttcgcctcgctcctcctatcgcacctcctgcgaaactcggagacggccaaacgactggcctgtgccatttcgttcccttcctcgccacccgctccggctggtgacgctgccgacgacgatgacgaggacgagccagtcacgctcatgcaggtcattgtcggcaacctcatgatggccctccgcgaggccggcgaagcgaccaaccgcgagctccagggcggccaccagcacgcccgcaaaggttcgcacgctggccaggacgaggatgatgagcggcgcaagtgggtaagcaaggagtggaccaaggcaatcgtcggctggcttgttgctctcagcacctggctgtgggacagcccggcgagcgtcaaagagttcctcaacgagggctcgaacgtccaggtcgtgagtggaggcgcctctccgggacaggccgtgcacggaggcgctgactccacacacaccctgtctgctctctttcagctgatcggaccgataacgcaggcgtcgggcgtcgacccgctcgtctctggtctcgccgccttcgtgctcggcacgtgctacgagttcaaccgcacgccaggcgagatcacccgctcgaccctccacccgatcctccactcgcgcatcggccccgacacgtttgtgtcgcgcatggcccgctttcgcgaggacgcccgcttcaaggctgtcggcccgcccgagggcgtctgggaggaggacgagggtgagggagagctcgtctttggcctgacggctgaggaacgcgaggagatgtggttcgactggagctttgtcgagttctggaagaacaactactgtgcgtgggccgcctgcgctgctcttgtgaaaccgatctaaccctctatctccgcctcgttcttccgacagacacgatccagcgctcaatcaactctgatcccgagatgtcgcaaccggccgacgccaactcggagtcggcgagcctcatcaccacgctccgggcaagcgtcgcttcgcaggccgaggagctcgagattctccaggaaaagctgacgacgatgaagcgcgagcacgaggaggagctgcggaggagcgaggaggaggtcagttcgctcggtctcaacacttcccttttagcggctccgctgacagacgcctgtcgatatcttattcagcgcactgccgtccaggaagagctcgcatcggtccacttatcggtcaacaccctgaccgcctcgctcgccgcggccgaggtcaaggctcaggacgcgaccaaggagcaggaggaccttctcgtcctactcgaggagctgagcgagaagcgtcgcaaggacaaggagctcatgaaggagaagggcctcgaggtgagcgaggacgagggcgacgacgatgacgacgaggacgaggacgacgaggacgaggacgacgaggagaaggacgacgacttggcatagacaggcgccgtcgcttgcttacttctaccatgaccttcttgtcatgacgctcgacgtcaattcttgcgcctcctcgatcagggccgcagcgacacaagtggagtggcaggtacgcattcctgacgactgcgcggccctttcatcgcgcacgggccgacgcagctgtcgcgagcccgcctccctcctcgaccacaacccgcctctactgccctcgaagctcgcaagcttgtgagtcgttctcagcatacggacaccgctcgaccccgagcgtgagacggctgcctgacacctgtctctcctgccgcacccgcgccggccgccgttgtcgctgtcagctcccagctcgccagccctgtcacgcccagcgcctcgaaacaccatctgtcgagcgtctggatcgcccatcgtttgctactctccgagtacttgcctttccttcgacatgtcagtgcctcacttggctttgcccattgccgttgccaacactgacggcagcccgctttctgaacaacccctgtcgccgcgcttcaggttgtcaccgcctacctttcctctggagcttcggcttgaggtcttccggtttgcgattgacgacaccaagcgatcgacagacgccgctgctttggccaagctcctgcggacgatgagcctcgtctcgcccgcctgcctcggaagccctctgaccggacgctcggcagctgcgatgactctgactacctcctgtttaccttttgacctccagactgaagcgcggcgcaacatcttccatactgccaatcttcaacggcggcgattctatacgccagaggttgttcgaggcttcttcgaagccgtcaacaacaacctcaaactcggcacgctcgtcaaaggcatcctttgcagcttggacacgacctactggatccttgccatggccggccacttccccaatctatccgtcctttgcgagcttccctggccggagagcaccaaccggtatcctgctggtcctgtgtcaggtcaccgaccggcactcgccgagctcacgatggtcgcagactgggaagaagcctcgccgccgccgctgacgatttggtacgacctcggctcgctgcagaccttcggcttcaactgtcaactggaatagtggatcaaaaaacattggtttcgagcagatgctcgaggctcttccagcctcggtcgaccaggtggacctgcaagaggtgaccgagcggaacgtcccgtcgcttctcgagatgatctgtccctggtcaggcctttccgccctcaccctccggtccgttcacctcaatcgcaaggtcatcgatggccctctctaatcggacctcaacccgctgctccttttcccgaacctccggaccctcacatttcagtacgccttcgccaactcgatctctgacatcggacgcgcgcaccttgagactatgcccatcggtctcggcgagcatttccacaagggcccgccgagtgatgacggtcttgactcgtctggaagccacgatctcttgaattgatcggacccgatgtatcacaagtacggcgccggctttggcccagacgacccagtctacgaaatcggcctcgacatctgcgacctgctcgtcaccgccagcgagcacttcccttccctggcaaaggtcgcccttctccccggctgcaactcgccgtacagttgggagaagcaggtcatgtcgttcgccgacaaggagactcggtcgacccggggtgtgcggcagctggcgagcatgtttgacgacgtcggtctcgtcctcctcgacgaggacggcgtcccatggcagcccaagtggttcgacgagaactgacgaggtgagtcagccgaccacctgtctctttgcagctctgtccgactgagattcctttgccaagtcctacccgcgcgacgtgcaccatcaagttgaccctctagcaaccgccggtgacggatccacgttcggctcctgcacgttcgacccctaatcgtttgtccactcttgaagctctacctttccgctcagcgtttggatcctgacccgtctcacgcgacttgacgagcaggctatttctttcccatcccacactctactcttcgtcccgctcgccccgatgagatgccctccttttctcgtctgaccggtcgcaagcaggcaaggggtcgtaaagagtcgtgcatcgccagtcaccagcctagagtctgcgcttcttggcctttggcttggccgagtcgttcgcgccgtcagtcgtcgccgaggccgctgctggtggaggcggcgcagaagacgtcgaggagccctcggctccaacagcgacgctgccgtcgttctctgccgctgcctgctgttccttgagccgctccttcttgcccttgcgcttcttgccgacaatcttctcgccgttggcgtcgacgccagtgtacttcttgctcttgccctcggcctcgggctcctcgccccacttgcggcccttaatggccttcttgagctcccacagccgcttgtcgcgaccgacacggccggcaccggcaccgccgtcggcccggaaggcagcatactgcttgatgccgaggaaggcgttgagctcggtgtcggtcgcgagcaggatctcagccggcgacaggccgtacgactgcgggaccgtctttgcgtagtgaaagcgcgtcgggaggttgccaatctgtcgaacggcagttggtcagcgaaacccaaggtcgagcgaattaggctaagaggcggcgcaccatgtcctcgtagtcaagcttgtcgtactcatccatcagttcgtcgaccttgcgctttttgctgtcctcgtcgccgcgggcggcaatcgcctggagctcggccgcctcgtcctcgccaatcttgacgttggcagcagccttgtccttcttcttcttctccttcttcttcttgtccttcttcttgtccttcgacgaggggggtaggtcgtccgaagcgtcggcgtcctgtgtcggtgaggcgagcgtcagcatgtcgagcgattgaaaggtcagataggagagcgcaccatgttgattgggccgtcaaaggcgtcttccggctcggggtccatgccctcgagctccattccctcgccgtcaaagttcatgccgtcctcaccgttctcgccggcaaagtcgggcatgctgtacatgtagccctcctggccgccgtcctcgtcgtcccaggtaggcttctcgacgtcctggagaaagggtaggtgtcaggattagctctaggctagcgagatgcagcgggcaaagacaaacgcacctcgccctcgatgaagtcgttgccgctctcaaacaactcgcgcatcttggcctcatgcgcagcgtcgtcaaactcgtcgtcgaggccgaggtcgttccactcgacctccttgccgcccttgccgacaccgagcagctcgagcttcttggcaatttcggctcgcttcttggccttcttctgcttcttctcctcctcgcgcgcgagcttctcagccgccttgcgctcggccttgatcgcacgggccgtcttgcgcgaagtgtcttcccgacgggcgagcgagggcaaagctcgcggatgtgtcgtgatgtactcggctccactgatcatcggaaggagggacacgattcagcgaggacctctgcggtcgagaggcgaggcgatactaacggctcctcgaagcggaagttgtacttgacctcaaactcctcctccttgtcctcgaattcgctgtcgtcagcgtcgtcttcctcgtcggccgagagcgcagcttcgtcgaccttggctttttcggcctccttggctgccgacttggacttgaaggcggcgagcgaagcagaggatggggcggcaacagcctcgcggtcgatccaaccgcggttgaggatgtagctgaggcgagaggtgcaaatgatcagtcagtattggcgagcacgcgaggcggggcagcgtgacgacgcactcgagcaggaactcctcctcctccttcttgcgaatctccgggtcgatctcgcttgcaccctcggccgccttggccttcttgtccttcttgctcttcttcttctgagagccctcagcctcgacgtccgcaacgctgtcgggagcggccgtctcaccggtaccaaagagcgcctctcggacgcctgcgtcgccgccagcgtggccaaggaggtaagaccggtactcctcgtcttcgagcggctcgtcgacgtcgtcggccccgcccttcttgacaaagacctcgccctcgtcctcgtcgctaacggctccgccaaacgcattaagcgtctcctcgcgcaagcgcgcctgctcggccgcgtgcgagtagggcgtcggctcctcgggcccggccgccgcgcttttgccggccgacgacagcagtgctcttcgctggaagtcggagaggttcatcgccttctccttctttggccgcttgtcggatgggagcttggatgatgagccctgctgagcggcaagtagagcagcctgctcctctgtaagtccgcgagggtgacaagaaagcgcccggcgcaggtgtcagctcgagctcctctgctcatcgacaagctcaggctcgaccacctgagcacgtccaggatgtaaagcaggaggacgcaccctcgaacacatttcggccgagctcgacgccctcgccacgtcggatgcggccgagcgtgcggaggatggcggcgtccatgacgggcgtgagctcctcgccctcgctgtcctcggtctcgtactcggacgattcatccgacgattcgtcgtcagagattggtcgcgaggccggagcgtgcagcgcgtcctctgtgcagacgaaagcgggaggccgggtgtcagccggtcgacgagcggctgctaggccaggagggtggaggcctcggagcaggacggacgagcgacgcgcgacgggtgcttgaacatgctgggcgaccgcgagctggctgctgctggtgtctcgtggattcgatgtgatgcgagtgctaaaggaggtacaagatgaggcgttgtgctgcaggcggggtcgatgtctactgtgacgaagcggcccgtcgtcgccggctgcgagtcgagctcgtcgggtcgcctgcgcgaaaatgaggcgggcgagcgcgggaacctgccagacggcccctttcttctgccctggcagacggaccagactttcgagtagtcgcccgtgtagcacgcatcactgatgcagacgtgctgagattacaggtacgaaacgggaaagagtgtctagaagatagtgtctttggaagcagagtgatgagagagccagaacgagatggagacgagacagacgttgcagtaagcccgtcaactcgaagcaaagccgccgaaggacgagtctcaagaccgatccggagagaaatcattggcttgagaacgtcgagaagaagtgaaagacaccacttcctgcagacgaggtatggtgttagcttcagcgtcgcgatgaacaacacaaaatagagcagcggttgggccttgaaggaggccgcccgagacgatcggtgaggtgccgacgaggaggagcccgagcaggatcgaattagtgctcaaaggaggtcggaagaaccatcgattgcaagcatcctcgagcgagacgtagcgtgactgaagaactcggggaaaacatctctgggctgacgtgcggcaaggcaagccagcaccttcaagccggcgctacgagagcatctaccaaggtctcgacggcccctcacagatgaagtactcgttcgacagttcagagaggacgagtgccaccagagggcgacgtcgatcgaattcagatatgggactgggaggcctcgctgggtcatttcagcagggatgatgatgctgtacaggcctgcaggagcgcgccttaagaccttgcgttccgccgcggcttgtagtggcgctcacgaatggtgcgctcgagcttggtctctgtccagcggcgaagtgaccccgagatcgcgcaggctccggtccgagtcgcttcagatgcgcagtctgcgttgttggtgatgagcgccataccgccagcgtatcggcagttcttctgctaacgcaaaggaggatcgctcccttcagcgacgagggttcgcaacaagccgagcgagagggaatgctgctcacctgcacattgtttccggtaatgtaggagcagcgcgtgtactggacgcctccgacatcattgttaggcgtcccggcccgttcagatggaattgtgttgggactcaggtagtttgggcctgcggacgagtacctggatatcttcagccccttcacttgcagtgcgagctcgagcaccgaagccactcacagaaaaacgagcatgtgtcgcctggaccggtcgaaggtataaatcacttgacgtattcgacgccggtcgggcccagtatgagggcggctgacgccggctgagctaccgtgagaaagagaaggccggcgacgatggtcgtggtgagcgaggcaagcatgacaggcgggcgagcggtgccgagtcaagtgtaaggtcaacgggcgagaggaggtagattacagcgaagaagagagaactgaaggcggcagtccctcgacttcctttcacaccgaatccaggattatggtcgacaccagactgcttccacctcttgttgcaaagcgccgtggcaagcagggccggcagagagcgcgggcaactcgtttggtcgtggtggcgtcgcgggcactcggctcgaagaggcaggcaggcgatgcgactgacgagccagccaccttttcacgaagtgaagcatgagccaacgccctcaagtcagccattggcgagtaggtggcagtcagcaagcgggcccacaacgattccaccgacgggtcgagtgaagaggacgaagttcgagccgagcccgcgacgcggtgcgggcagccgggccgacaccgaggggagctcggcatggcgacctacgcgaagctccacgcaggcaggccaccctgtctagtcgagagcgtcagcgagcgaacgcctccgaccagcccccttcccgtcttgctcgagatgtcggattctccccaacacccatctcgcacaagatgtctcttcccccgccatacacagacgacaagcggctcatcggccggcagacgacgcgcaaggcgctcgctcgcgtcctcgtcggctcgctcgccgtggtcggcggcctccagctcgccgggctgacgtcctcgagcgggacctcaattgccagtcagttcctccttcctggcactggtcagctgactatgagcttgcacgatagcagctggcagctgcctcagagcagggtctgcatggtttgctgggccgtcgagcaccgactcagagctgacttccgctctcgtcggattgcagcaccgccgctcgatgcgtcgaccctctcagccggcctagcttactgcgacgcgctctacgcccctaagccctcgttcgggcaccggctcgatgtcaggaacgagcgggctgacccgaacgagccggcctacctcctccggaacgcgacgatttacacggctaacggcgaggtcatcgagggcggcgacatcctcatccaggatgggctcatcaagaaggtcgcgcgcaagactagaacgatcagcgtcggcaaggaggtcgaagtgattgacgtcgccggcaggtggtgcacgcccggcgttgtggacatccactcgcacagtcagtcttgctctcttgcgtgaagttcgaatgggacggctgactgacgtcgtccttgcgtcttcctccacagtggttggtcttcgtcgccccctcgagcgacccctcccgctacgactgacgtcccctcccttcaccttgcgcagggcgtcggccccgctcccggcctcagcggcaatagcgacaccaattcgatcaagtcgccaatccttccttacctccgctctctcgacggcttctcaacctccgacttggcgtttgcaaactcgatcgccggcggcattacggctatgcaggtcctcccgggctcagcaaacaacataggtggagaggcctacttcttcaagccgaggcagatcaagggcggctcgccgagtgacatggtgctcgagccgccgttcgtgttcagtgggaacgggacgacgcgcgtcggcgggagggtgcggcgcgcgaagttcgctcagggcgagaacatcatgcgcgtgcatggcggcgtcaggtgcgtctcgcgcttcttcccgcagctaagggggcgcaaaggctgacaaagagggcccgctccttgcaggatggaccaagggcactggtaccgccaggcgttcgaggctggccgcaagcagatgctcaaggaggacgcctggtgcaccaaaggcaaggccaagtgcgtcttcccgagcccgacatgcgcgcatgctacctcggctgacgtctgctctgcgccgtgtgccagcaccgagccgttcccgaccgacctcgacaacgagatgctcgccgacgtgctgcgcggcaacgtcaaagtcaacgtccactcgtaccaggtgcggccttcgtatacgcgcagccctcatgccgaccacctcgctgacgcaaatcttttgcctccccgcagtcggtcgactttgacctgatggcccgcctctccaacgagttccgcttccgcgtctcggcgatccaccatgcgaccgaagcctacctgacgccctcgctcctcaagcgcttctttggcggcgcgccgagcgtcgcgcagtttgcgacgcatgcgaggtacaagtgggagtcgtggcgcgggtcagaatttgcgccgatcatcctggccgacgctggtagtgagtctgcaagacgtttcgggcggattttcgggcgggtcagaaggcgaggtgctgactcgcttcgtctgccgcagtcaccaacatcatgaagagtgaccaccccgtccttgactcgtacgttctgcgacatcgtcctgcccctactcttctccaattggctgacctaagccatgtacttgcagccgttacctcatgtgggaggcagcgcaagcccaccactggggcctcaactggacgctcgcgatggactcggtcttctctgcgcccgcccggacggccggcctcgaccaccgcatcggctttgccgtcgagggccatgacgccgacctcgtcatttgggactcgatgcctctctcactcggcgcaacgccggcgcaggtcttcatcgacggcgtcaagcagcttaagaagccgcacgtcgtcgcgaagccgaagcagcaggccgtcccgccgtcgacgagtgacgcggtcgagcgcgccaaagcggccatcaacgctgagagcgagctgctgtacgccccgcgcaagacgctcaagaacgtcgtctttatcaacgtccggtcgttgtttggcatctcacccgagagcggcgaggtcgagcagacgtttggtgcctcttacgacaacgacgaggttgacgccgccgccgtctcgctcggcacggtcgtcgtccgcgacgccgagattgtctgcgcaggcgcctgcgagagtttccaatatgggatcgccgacgtcgttgaccttcatcaaggatcgctattgcccggcttggtttcttttggcgcgccactcgggattgtcgacctcccgagcgagttgtcgacaaaggacggcgaggcgtttgacgtcctggcgcccaaggcgacggtacctgacttgcttcggggccagatcatcaagggctctgaagcgttgagcctcggccagaaggacctccggtacgcaacggttcctttatgaccccaaagcttcacgcgctgaccctctcctgtctttgacaggatcgcccaccattctggcatcctgaccgccatctcgcacccttcgagcccggggctcgtctcgggcctctcgtctgccttccgcacctcggccgacaacgtcctcagccgcggcgccatcgtccaagacgtcggcgccctgcacgcttttgtcggccacggccagggcgcagggaggggttacaacggtggctcgatcgggagtgtctcgagccagatccgggcgctcaaggcgtttctcctcggcggcgcggaggagggctccgaggcggcagaggtgttcgccgacgttgctaggggaaagatcccgctctgcgtcgcggtcgttaaagccgatcatattgcggcgctgatcgagatgaagcgcgcggttgataaggcgacgggctcgaagatccggcttgtcctcgagggcgcacatgaggcgcacctggtgagattcacctttctctgtcccccctcgctaactagccagacgctgacccgcaacccgacatcccagctcgcggacgagctcgcccaggaggaagtgggcgtagtgattaatcccccacgaagttatccaggcagctgggacggccagcggacgctcgccggcccgcccctgaccgagcacacgctcgcctcgctcctgacggctaagggggtcgtcgtcggccttggacacgcgacgtcggacgcgactcggaacgcacggtacgacgcgctttggaactaccacgctgtaccggggacaatcacgccggagaaggcgctcggcctcgtctcggccaacttgctcaagctgctcggcgtcaaagccgagaacgcgccggggagattcatcgccgtcgagggcgatgcgtttgggatgggcagccgggtcgtcggcgtcgttgatgacggcctgatcgaactgttttgacgggggcggcaagaaggggtgtacgtagtgatttgatgactgatcgcaacgacgaggaaaggatggggattgcggctgtagagaaggccagcagactcgcagcgttcaccgcactcagcccttgcgccgcgggcgctgctgcggagtgtttggcgcgggcgaggtgtcgatcgcgccgcttcgcctcgtctgtctgtcgcctgtgctcgacctcgcctacagccctcgctccttcccggccgacgtcctccacctttagctaccctcaacactctgatactctcacctgccctatctcctctactcccgactggagcgacctccgctcgctccgcaaggatggtccggcccttgcccgtcccgccaacaaagcaggcaccgccgccgcccccgccgccacgaccgctcccgacgccgaccagcgggctctcggacggcccatcggctccttcattcaagcgcgagcgccagcagagcgcgcaggacggacacggtacacagcagcagcagcaacgcgaacggagcggaaggggcgaacgtcggtcagtccctctccatcttcgagaaaggcggttggcggcgcgcgcacgggcgggctcgtccgggacgacctcgcttagcagacctcgctaccagggacaagaccctcgcgggatctggagccctccctcgtcccttgccgccctcgactcaagcattcggactgaacttccttttgctcgctccttctgaacttgacgctcgtcagcagtcgccagcagccgtcggccgcctccgccgcccagccgactggctcaccgcgcttcagctcggccttgcttgccggcaccgcagcaccttccccgccagccagtcacggccggccctcgtcacctgctagtgtcccgtcctcacgccatcatacagctggtggcggcggtggcggtgtgtcgctcggcgccgccgctggtcgacgttatgcccggcctgggccgggagagtacgaccggtcgatgcctcccccgccgaaagcacggacggctgctgccgggagcgactttgaccgctcgctcccgatcaagacggccgagccgcccatctcgtaccagcccatcatccacccggcggcggctcctaacccgcagccgcccgtctcgcgccagcagtactcctcgtcgcgcggtgcgcccgaacccggccggcagctgtttgatccccgcttgcacgacccgcttcgcttcgtctcgcctcggccagcgacggcgtcctctgtcgctggaacctcctcaacagcgacgacggcgccctccgtcattcactcgacatttacgctcaactcggcctcgaccggcttgtcgtcaatccacgaaccgggggcgtcggacaagggtgacaaggaacgcgagcggaggaagcggcgcgaggggagcgagcggaagagccagcgtgctgaagacgacacgcgtagtcggagttcggaggggagcgagagtctcaaggaccgcgcaaggggcaagggcgggtgagtaatctcgtccactcactcatctggcactccgttcgctgatctggcgacctgcttccttcgcttcagcgatacgggcgtcctcggctcgctacgcgagcagtatcgcggcattcaggcgctcgaggcccaccttgtcgatctccaccggcgcatgggccgggacgagacaatcgtcctcggcacgggcgcgacgcttggccctggcatggcctcttcgggctgggtcgagctctgctcgcgccacatgaagctcgcccatgcccaccacgatttcctgacggcgagtctcgacccgcgtctgccggcgagccttcatagcctgccggtcaagtacaacgttgctgcccggctctggcagaactcgtttcatctcttgattgagcgcatgcggacgacgtggctcgcgccgtcgtcggcggctctcggtcggaattcggccgcagaggacggccagcagcacgaggcggccgaggcggcctcggcgagggcgctcgagcatctgaccgactacatcctcgacgcctatcaattttacacgacgttgctcgacgaacaggtgctcgtgacgcttcgctcggcctggatcgaggcgctcggcgacctcgcacgctatcggatggcggtcgccaaccacgtcgctcagtcgtcgacggccgcctcgggcgggatcgagtcgtctcctccggcccggtttgccagaattgacgacgacagcgaggacgagctcgtcccgcctgcgccgctgatcccgtctggtaactcaatcggcaaggaggttgccgacgcctgggacgtcgaggaccgcgacacgtggcggacgacggcgcgcgattggtatgcgctcggcgtcggcgagaaacccggcgaggggaggctccaccaccggcttgcactcattagtcgcgacgtcaagggcgaggagcagcgcgcgctctaccactttgccaagaggtgcgccttcgcacccctctgtccattagaaagctgagagctactttctgagagccaactctctctatcccgttctgcagcctcatcaccaacaacccgttcccggcctcacgcgagtcgatcctcccgctctttgacacagccctccagtcccgccggcaccacccagacgcgtcggcggccgacctgttcgtgctcctgcacggcatgcttttcacccggatcgagctcgacacctttgatgaagtctttgcgcgctttttcgagcgcctccaggagaatcgggtcgggacgcggccgattgggtcgatcgagtgggtcatgatgggtgtcattaacctcgcggcctgcttccagtacggcaccgaggacagcttgctcaagcgggccggcgccgaggatgctgctggtcgacgaccgacacggcgcgagggcgcctgcggcggtgctacgactgaaactagcgcgacggctggtggcgacgccaacgcgccaccacaggcgatcatggtccatggcggcggcggcaagcgctcgagcgaccctgaaggctcggacgaagcgagcgacgactcgccgccaaactcggacatcccagccccagaggacggcgacgtccggccccttcaccggctgtcgaccgtcgtcgaggacgaggactcgctgccactgccattcaggctcgcgctccggctctcgttctcggtcctttcgttctgcctcgcccagccggtccggcgcgactcgctcggcagggccgtcatcaacccctacatcaccctctttctcacctttctctcgacgatcgccaagcagccggcggcgctcgcccttgtcgaacgcgccgtcccatggtcggccctcgcgagcttcttcaacacggtcccgcgcaagattgacgtccggctcgacgccgcgccgaaactgacggccggcggaccgctgccagaggactggtgcctgcgcgggatggagtgggtcggccggcgcgtctacgagcggggcttttggaaggtcaagccgtcgagctcatcaacctcctccggcggccggtcgtacgctggccaaccagagggactgcgccactcccaggcggccgtcatcgcctgcgagatggacgtcctctcgcagcaagtcgagcagctctcggtcgagcagcagatgcacgaaggcatcattgacgactctgacggtgccgaggcggccgagctgacggcacggcgctggcggcggattgcctggtcgctcggcacggtcgtcaagagcgttccgggcttcgtgctcgacccggacggcgcgggtcgcaaggtcttgatcgacccggccgggccgctccgacgcaagctcgacggctgggcggccgagcgcgtgaagctcgtcgaggagcttcaggcccggttgcggcagcacgaggcggcgcgcgacgtcgtcctcgacgacctcaccgacggcagcgacgacgacgacgcctcggatggcgaggacgaggccgacccagaggtcaaggagctcaaggtgcgtccctgttgatcaggaaaacagactgactgttctcgctgaccgtcgctcccacaacccgtaggcccagcgtcgccagctccgagccatcctacgcgccagccggcgtgccgcccaaacctcggctcccgtcgcccgcaacggcccggttcgcaaacaccccgcacgggcacccggtcccgcgcaggcgctcccggcggccctctcgggctacaccgtcctcgtctttgacaccaacgtcgtcctctcgtgccttgcgctctttaagtcggtcgtcgagagtgcgttttggacggcaatggtcccgctgccggtcattaccgagctcgatggcctctccaagcagccggccccactcggaacccaggcgcacgaggcgctcgattttatcgccagccgcatccgctcgcacggccggtcgctcaaggtccagacctcgcgcggaaactacctagccgacctcgctatccgctctgaggccgtctcgttcgcgttctcgagcgcgctcaacccagaacaggtccgcgacatggacgacctaatcctccgggcgtgcgccttccagacgacgcacttcgtcgaccggacggccgtcctcggcgtctcgcgcgacgtatcggccgacgtcaaggaccgggcggccaaggtcgtccttctcactaacgaccggaatctccgcctgcgagcaaaagcccagggcgtactcgccgtcgacgagaagccgatgcgcaagatgctcggcctcgcaaaggacggctcgccgcttcctgccgctggggggtagttcggtttgcaaagagagcctctgagggccggctgcctgcactcgcctggcgcaagctagctgccctcccagctcttggacctcacccaacctccccctcccattccaatgggctgattgccttgcacgggcacagtcgcggctgccgcacggccaatgttcgctgtccgacgtctcgacttgactcgaagggctagagctggccaccgacaggcgaccggtgcgccagtacagcagcctgtgtcggctcggccaaagcggtatgccccgagtgctgccgctcagttcgagtgctacgcggtcaaattgagggggctccgccgagcggtgctacggtccctttccgaccctgctgcctctagagatgctcttttacatttttcgctcacgctaggcgagctgctgggcatctcgcgcagtcatctggaaaagggcatcatgagagagtgtggggagatcgtcgcagcgactgtcaccttctgttgcgagagcgagagacatgtcaatgcagtgcggataagcggcggcgcgtgaaataactagggataagtgtccagaggggctgatgggtttgcggtgaggggtaagggagagaggcctaaggatgtatggcccgggttgcgtgtattgtgctgagatgataggcggacaaagagagacaggggagagagccgaccgagggttcagctctcgtccatgtcgtgggtgccgtcggggccggcgtcgcccgccatgcgctgcttgccagggccttgaccggcagccgctcggccggtcgagggccgtcggctgacagtagcgccgccggcggtcttggtcagagacttcttgcgcgtcagggcgacggcagcgggcggaggaggcggagcgacgacggcggcaagctgttcgacctcgtcctctgcgccctcctcggcgacgggctcgagaccctcgccttcgccttcgccgtcctcctgctcgtcgctcatccggcggagaccgctcagctcgtcgtcttcgtccatgccgtcgtcgccgttaatcggaccaaactcatcctcgcggtcgacggcgtcgacgtcgtagtggaaaagctggtcgtcgccgtcgaacgagccctcgagcccagtggcggcccggagctggcggatgttgtcgacgagccggccgatccactcgtcacggcgggcgatccggccgttgaggaccgtcaaatgcttgttggagcaccggaggagggcgaccttggacacattgcgatttggctcgcccgtgtcgaggttgcgcgcaggcaagcgaggcatcgacgcgccggcaataggcaggcccgtgtccgggtcgacgagctcgacgttgatcggcggtaggagcagccgcagctcgtcgaagccggccttgagcgagtcgcgccgcttctgctcggccgccttgtgcgacgtctttttcgtctcgggcttcgcaggcgtctcgctcgacacgaccggcggcggcttggcccccttgacggcccgctttagggtgccgaccgcaggcgtcgctgatagggagagcaagagatggcaggtcagcagacggtcagaacacggtgaagctttagaagcgcaacacacccgcgacggcagccttcccattcttcttgagcttgctgacagggatgagcatctcgcgccccttacccttgtcggcagcagcacaaacaccgacaccagtcggtccgagcgccgggctaccgagtgggctcttgccgacgatccgtaccgcttgcttcgtcggctgccagctcggaccgccagtcgagccgttcgcggcagtcgtggcggcgaagccggctttcggcgcaacacccgagccagaggcgctaccgctgctgctggcggcgttgcttccgctcgcgctcgcattgtcgccagcggcagtcgtatcgacgacgatgccaggtgagacggtgtttccctccgagtagatcgcccgctgatcggccgccggacgaccgaggttgaggaatgtcgcaggcgtctgaggcgcaacctggctcggcggctggggttggagcgcctcggccttctgtgatggatgcggcggcggcggcatctgaagcgaggcaaagtcgattggcgagggtgatgagtcggatgcgaaggtgtgctggctcgcgctcttcgagtggccgagcacatggccggacccagtcggcaggaagagggccggaccggaagcggccgacgacgccggcgagaccgactgctggatcgagccgtgcgaatgagaaacctccatcgggatggccgaggccgggaggccctggaataagacgtgggttgtcgacaacggctgcgggccgtcctggccgccgggtggggtcatcaccgtcttaggactgccgacggcgctgctgcctccgccgccgcttgagatgcccgacgggccgtggatcgtactccgccggcggggttgaccgctgccgacgacgggcttaatgatcggcgacggccgcgtcttgctccggctcgtcgaggccttgccgccgttaaggccgtcgagcgccgtcgagcccggtccgcgggcggctcgcgaggcgctgctgcgcggcttgcttgagccagacgggccgatcgagccgttgatgaggggcgaattgggcgttgagcgctgggcgagcaggtgcgggctcatcgtcccgatgtacgggtggtggtgaaggttcatgccgcgctcaaactggctcgggccaagggccggcgacgtcaggggtgagaaaaagtcgccgccgccgctagggtgtgccagggctgggttgagcggctggaatgttgagccgggcgtcggatgcgagatggccgtcatggccgggctgatgagaggcgtcatcaggagctgcggacaaggtgaagggcgacgtcagccagggttgtgttgtccggatcggcgggcacttgaagcgagcactcacgttgccgtcccggtcgtacgcctctccggtattacgccagtgggccgtgccgctcggcctaccgccggcgttgtagctcgtgccggggaggtagacgggcgacatcatcccgccggcctggttcatcagatggggcgagaaggtcatggcgctgatctcgccagagtggtctgcgatgcagagggaaaacaagaagcggtcagcgagcgaaaacggagcaagagagcaggctgacgaaccgggcgtcggtagcgggccgatgttgatgcccctgacattgtgcttgctcgtctgaccgtgctgagagccgtacggctgggaattcaggtggggcgactcgcccgtaatgccgctactgctgcccgagccatggccaatcgagtgcggctgctgactcgggtgccactggtgcgtgccgttctgaaccgaggcgccagagggcgaggtcgtgctcgtcgtcgagccgctgccgccagcctgctgctgctgatgcgggttcgactggtagaacgaggcaatctggttgagctggagggttgcgggagcaagaggcgacggcaggagtcagtccgagctctctcgtcccgcgctgagatagaacgcacctgctgctgaatcatggccgtctgctgctgctgcatctcctgaagctcgcggagcttggccagcgtgacgcccgtcgcgtcggccccttgaactgaaccgccttgcgatgaatagctcgactgctgctgctgctgctgttgctgctgctgctgaggaccgccgaagccgggaaggccgagcagcgacaggagggccgagacgtctggcgcaggcgactggccgccggcagagtgctgctgctgctgttgcttcttctggagaagctgttgtagcagagcgagcccgtttccgttctgcccgaagccgccctgctgggcagagagctgagcgagaccttggagctggggcacaaggtcgaggaggccgtttgaagggccagcaccaccgccgtgctgctgctgctgctgatgctgcatgaggagctgctgctgctgtgccaggagctgctgcggcagctgaagcgcggccgggtagctcgtcgaagaaggcgatgaggcggcgtcgaggtcaaagtcggcagccgaagcgccgagcgactcgagcagggcgcgcaggtcgggctgcagtagcggcggcggcggcagctgctgctgttgttcgagcggaccgtcgtgctgctggccgtgataagggccttgctgcgactttccgccgagagtcgatgatctcgagtgttgtcggctgtggtgccggctgtactgctgctgttgctgctcgtggtcggccggcggctgctggtccgtcgtcgggtggatgccgaacatgccctcgccgtgaaggccgtagccggcgtcctggccgtcgtcgtctcctccgccagcacctccgccgacagatccgccatgtgcatcgggcgagagcataaagtcgagatagtcgccgtcgttctgacctttgctttggatgttgccattgaggagccgctgctgctcaggctggtggttcgagctcggcgtgccgccgctcgcgccaggcgttgacccgccggcggtggcgtgagatgagtaccgcgcgagcagcgccgacgacggcgggagagaggccaggtcgagcggcggcggcgaggtaagaaagtcggagagcgacagcggcgacggcgcggatgacattcgagcgagcgagtgcggaagaaagcgagcgagcgaggccgtctgatgcgcgacggtcggccgaaggaagaaagggactggggccaaagtcgaggggcggaaacaaggagcgctggctccgacctgacgtcggggcgagcgaggaacgaccgggcgtgattgcttcgtgcgagcgaggaaagacttggtgagaaagaggagagagggaagggcaggacggcttgtcgctgcagctgggctgagaagacgaccccgcgcgagcgcatccgcccgctcaggcggagaccagcagcgcattgcggggacccttgcttcttgccctctctcatttgacgacgtccgtgccgagtagggtaggcatggaaccccttcttacctgcgagagctggacgacgcgcaacgtacaacgtacgactgaccaggcgccgccgctgactgcctcctcgagaccgcttctcctgcccgaggacgatgcaggcgagcctcaaggacggccgaccgccggctctcggccggctactcctcgatattcaatcggggcacaaaaaataaccatgctgcttttgtcttaaaacgcctgtccatcttacaggccccgcacggcatcttcgatcgatcgggcgttgcgcgttgacgtcgtcgtttgtgacagctcggttggtcggaccgacgtcgcttgctggctgccgcaggctgggctgaaggaccgacgtcgaggatgaccagcgaaagtcgggcaggctcgcgacaaacgttcagacatacaacgtccgtctgtccaagcccgtaatgatcgacgaagagcgggtcaagttattggggatggccgaaaacatgacgatatgggatgcgggctgtggcgcgcgaggtgcgagtggtaaagcagatgagaagcaaagggtgcgaggaggaggagggagagaggatggaaaggcggctgcccttaaagggaccagatcttgacgacgccgtccttggcgccgctcacgccgtagcggccgtcgtagcggcccttttcgacagggctcgagtggccgccggtcgtcaagctcttcatctcgcgcgtcgtccggttccagaccttccagccgttctcgccggcgcaggcgacgatcttccgcgagtcaaactgaagggcggtgacggggaagtcgaacgagagcgtctcggccggcaggccggtccggaggtcccagatccggatcgtcttgtcgagcgagccggtgatgatgttctgctcgtcaaactggaggcaggtgacgggcccggtgtgcccgacaagcgtccggtgagcttggccggtgcgcactgcgatggaaagggcatgcgttcagccatcaagctcgtcgtcttgtgaaaaaaagcttattgagcgactcactgtcccacatgcgaacgccgccgtcgccgctaccgctcgcgagagcgtagccccagaactgaacgccgccgacaaagtcgtcgtacatctcccagctgccgtcctcgtacggcggggtcgggacccggaattcgttactcgtcacggccgagaggagagagtgccccgagaagacgccgccgggggtggaggcgccgtaagggtcgctgagcgagaaggcgttggacgtcgaggccgacggcgacgagggcggtgcgttcgagatcgcccagaggatgtccatcgtgaggacgcactggccggtgttgacgtcccactggcggattgtcttgtcagacgagccagtcacctgcgagcagagcgtggtcagcaccgacaaggtgacacgagcagagggagaagcttgagagacgcaccaggcagccatcctcgtagtagaggctgctgacggctttgctgtggccctcgagcgtcttgacgcaaggcccgccctcaacgagtccctcgccatcctcacgccggatgcccgcgcccttggcgagcgtgtcgaggtcgggcagctcgtcgtcctcgtcgtccccagggtcagccgcatccgactcggcatgcgtgtcctgcccgacgaagcgtgtcgaggcctccatcgccgccgcgagccgatcctcgtagtcgtcgacaagacgcaggtcccagagccggatgtccccgtcggcgccggctgtcaggcagagctggtcgtccgtctggattgtcttgacggcgcccttgtggccgcgcagccggccgacctcctcgccgctgcagagatcccagacgcggacagagtcgtccgtcgcggccgagacgagcgtgccatacggctcggtaaagtcgagtgcggtgatacggccagtgtgattggcgagcgtcataaaggcgacacccggaggcaggtcatcatgttccgatggcaagaaggctgggcccttgcgtcgccggttcgagctcggctttgatgcgcgctggtcgagcagactccttgggacgccatttggcgcgaccctcgacaggcgctcctggacgtcgtcggctgttaacagacacaaaatgtcagattgtcgctctcggttctgccgcgagggaaccacggacgcaccctcctcgacgagctcgagatcctcttccctgagcttgaggatgccctgctcgagctgagagcggatcgtctcgagcgcggcaatcttgcccgagacctcttcaatctcgtggctcaagagcgactgcaggaggtgaaaacgtcagctgcgggcgcgcacgggcagaagacacaatgctagagtgcgcaccttgcggacgacgaggttctcgcgatcccacttgatctcgtcctgcatacgaacgagctcctcagctccgatgtcgcggcccgtcgtcccgtggttgtgggcggccgtctccctccggcggcgcctgcgctccttcgggttcaagatctcgccctcctcctcgtcctcagcagctccgccgacgacgccttccttggctgcaattttcttgacgcccacgctccctccgatgcccgagtcggcgagactgcctcggacctttcgccgcctctctttgcctgtgtcggcgctcggcaccgtcgcctggaagccgcggagcaagctgacgttcccagacgaggccggctcggcgtcgggcacggggatcgacaggagcgatggcacgacttcgagtattcgtagcgaagtcgaggtcgttcgtcggttcagaacgccggccggtaagcgtatcggcggcatgtagccgtggccgagagcgagggctgacgacgaggcaagcgctggtgcgctccgcgactgcgtggcgttctgaaggagcctaggtgtgaggagcaaaggtgccactgccgggtgcatgagggtagacgggaagtcagctcaaaggtccaagcagaagcttgctcggtaaggctaggtccaagggcgacctgcagggcgacgcagggcgacctgcagggcgactggcgtggtgcgatggggacggtcggtcggacgcaccgtcggtgaggagctcgttgccgccgccgccgggcggaccacggcccgtccagttgtttccaaacgtcttgacagcatgtccaagcacagccatcgatgacggcaccgagtccgaagcgatagggtcgagcgctgccttgatcggcttgcgagggtcgcgtgccgtggaggatgacgccccgtcagtcgccgtcgaccggctgccccggcgctgggacgagtccgagaagggcatggccgattggcagctcaggaggcacggagtgttgttgaagacgcttttacctgccgtttgctagattctaggcctttaggaagggacgagcgaggcagtgagtgtctggcgggcgcaaggtatgagttcgggaggccgactagatgttcggcttcggcgcctcttttcggcagggcgagagagaggttgccctcgcctcccgaccgacgagatccctccgccagccgacccaacgccttcgcacaagctcgcacgtctccaagcccgctacacacagcagtcaaaacaactcaagctcgccacaaggggccgatcggagccgtactcgtcctgtgagtcgacggcctcctggagctcgccgcgctgctcgacctgcttggactgacctcgcacgcccttcagactcagcatgtcgtctgccgccgccgctgccggctcggccaccaagtctgcccgcaagaaggtcggtctcgcgagcccgcagaaggtcaaggactttttggccggtctgaaggagaatgctgcgacgacgccgcaccgactcctgcccgggacggagcgcgtacgcttcctcgtcaagaaccgtctcgaggagtgcgtgctctccttcgcagtcagaggccgacatggcacgctgatcaactgggctcctacatcgtctgtctcgcgccatcagcgaatcgcacccgtacttcccaggcaagccggccggccacaagtcgcgcttcagcgcaaagatcggcgagccgtcgcacctgccgctgctctcgtactacaacccgagcacgctgatcgagtttgagtaccggaagaaggacatcgcccctaagccgcccgtggctgctggctcgggccagctctactttacgcgcgagttcctcgacgtctggaagacgggcgcggccgagccaagccggtacgacatcaccgaccacgaggtcgagtcgatccttgcgctcgtctgtgagccggtcgaggtctcgaatcaggcgctcccgctttcgaaagtggccgagtcgatccctcttgaggaggggccagagctcgacgcctacgtcgcgcggacgaacgcagcccggctggccgagctccggtcttcgggcaagctcgcagagatggaggccaagcgggcgcagcaaaagattgagtcggcccagcgcaaggtggaggtcgaggagcgggctgcacgggcgctcgctcaggccgatgacatgccggccgagggtctcgagctctttacgctcgacgataagccgtcatccgcctcggccaccgactctgcagggtcgcccgctgagactggcgacgctaccgcctcgtcgggcggtgcgacggccgatgactttgagcactcgacgtcggcgtgggacgccatcgacaagaagatgaaagctcgggccgacggcgaggccccttcgtcgtcgtgatcgcatgtccctctcagacgatgggcgctgcgtcgcagcaggtcgcaagcgagacctagcgagtcggacgagctgaatcatcaagatcatgagagagagagagagatcgtcaatcgtcgtcagaggggcggctcccctgatgcctcggccttcggtcggcgctttgcgccgcgtccgtcgggccaccatccttgccgtccatcccgccactgtgtgtctggccggcacgctagtagtctggcaggtcggccaggtcgaggcaatagcggtcgagctccttggcgtagcgcttcgcaaagactttcactccaaggccgttgcagacgcggctggcgggtcatgggagagcggagcaagacggtcagcgagagccgagcagagcgaggacctggggcaaacgtactcgaccttgaagccagcagcaaaccaacaggcgccttcatcgtagtcgtcgatgaagtagctgatgccggccgcgagaaggtaggcgacgacgaccttgctgtgacaggcaaagagcgtgtctgtaccagtgtcctggtactctgggttgtctccaccgaccgaattgatggccttcagcgcattctcgatcgcaagattcgcccagacggcccgctcgcgaaagctcgaactcctatggaggttgtgatgcgagcagctgcagacggcgcgcgcgaggtcgccggccatgttctgcacccggacgacaggccaatcagctcgacacgaatagaggcacaggtagagagagagagagacgtacggcgaggcacatgtaggcctggtacatctcggcccgcatctcgcggtcgtgatcggtcgaatacgtcttaacgaggtcggtgactctcgcgacgaccgtgtcgtaatggcgctcccaaaccgccatgttctccgagacagagcaagccgggctcaagttggtcacgagccggaggaggtgccgccgccggttccgggcctggagcgagtccttactgtcctcctcgcagacggcgcagatgcacttgtcgatcccgcgctggcaaacatgagagagaaggtgtcaaaatggcaccttgacaggccgacgagcatgaagactgaccttcttgagagcctccttgcgcgcctcgtaatcaagcgacgggtcgacgtacggaatcgtgagctcgtcgttcgtatccataaagcgcgtcgcgcgggcaacgagcgcatcgccaacaaagctgatgacgacgttggggttgcagctgtggttgaagagtgaaggcgcgccgtaaatggcgaccggcgcgcggctgttgacgccactcagcccggccttgtcgtcgtctaggtccgcagcgaagaccggtccgatttgccggacaatgaacgcgttgtgcgcgacgacgccttcgatacgacccatgtcgatgtcgacgggctggccgtctgcctcggccttgggcttaagcttctggagcgaaaaggccggtggtgccgggccatatttgctgccggcaaagagcaggccgacgagcgaggcaacagccgtgtcgtccagcgtgctgagcggcagacaaaagcaaggacaggtcaggactaatagacctgaagaggacaaaacgaggagaaacgaaccgcattgcgagccggtgaggcaggttagcggcggtcgggttgctgatgccgccgacgtgcaggttggccgccatcgtgtgcttgccgacgccaatctcgtcgatgtgggcgctcgcgaggggtctagcgaccatgagcaggcagctgggttcgatctcgcgattggcgaggaggccgcggcccttgcccttgacggttgcgacgcgcatatccgaggtagcggtgtagtcggccaagtcgacgtccggcgactcttgcgcgaggtcatagagcgcctcccagtcgtacacttcgttaccgaatttggcctcacgtgagcgctggtcgattctgtcaatcatgatttcgatgggtttgcggagtgactggtcctctgagtctatcgtggcggtcgcctccctcagacgggtctgcgccggaccccacagctggaggccgtagtacgccttggccgcgagataatgcgccctgaaccgctcatgctcggcgaggagcgggccgcgcaggaggatgtggtcggcgtctcggagggtagaccgccagcgcttcatcaagaggcgtactgccgagcgctcgtcgagcattccgacgtggtccttctccttcttgagtccctcgttcaagacgtcttcggctgctgccagccaatccttggcgcggtatgcctggctgatgcggatgcactcggcgacagtcgtcggcggcgtaaagttgccgacgccggccgccggcttcttccactcgaggcctttcagggagtcggcgttggcaaagacgatatcggtcggggacgagaccttgatctgcaacgtccagcgacgaacgcatcctcgtcaggagaaagctcgaccgagaataaagcggtgcgtaaaggcgtttaagggcacgcacgatgagcgagcctccctcgctgacgaagtagggctccttgatgatgaagcagcgcccaaccggtagcatcgctctcgtttcctcgaccgatgagacggtagagtacgggggaatctcgagctcgacctcaacggcgcttgaaggaacgagtcggcgacgtcagcatcagcggctgctgaaagactgggagtcgcagacgaaccggccattcggagactgggcgacaaagagggcgccgccgacctggtagaccttggagacaacgcgaaggatgaggtagcgcccctgaggacgatcggcccgagccgagcagtcagtgctgcgctcgagccggtcaggccgccaaatgagctcgagcctttgacgacgcacctcatggaccgtccgcaggctcatgtgcgacagctcgatccggcgaagttcttcaatggcaagcgttgagtggcgcttgtgcgggccctcggtcacaaggtttttctgctgctcgtctgcgcccgacaggcgcccgaagctcgtcgcctggcgcttgacaatgtcctcgacgagcgcaactacgacgcgaggtcaaacacatgcctctgtggtcagctcagagctttgaatcattaaaaaagctagccggacaggcacacaggaactgccaggaggcgagttggaggatcaaaggggtccgcgcgtcaggagaggaggcggacgagctcgggcactgggacgcactttggcttggaaggcggcgttttggcgttcttgtggagctctttcttcagtgcgacagcagccagctcgtagtcctgcgtcttgagcaccatgctaggcggtagacggtcggcgaggcgaggcgagggggtggcgaccatgcccggaacgggcgtgcttcggtgtgatggagcttcgctgaccgacgacggggagcgaagtggcgatactagctctacgggaagactttgaagccgcgagccggtcgtcctatgctggtgagtcgggcttcgaggcgtggcgagggtcgtggtcgagcgagcatcagcagaggagccggctcaagctcgaaggacaaggagggtcgcgcgcagcaggcctggcgtccgcgctcgcccgcatgcgtacggctagacgacccagggccactcaggtcaaaggaattcaggtcggacagctctgtctctgatcagtcctattctgccacttgtacagtcctgccctcgccctgtgtgcaatccagaagacggtcaccgtagccaggcgtcatgcatgcagaagactcaatccccttcggcaggcttcatcttgacgagcgacggcggctcctcgaggccaatctcgacctttggccgtgccgccaaggctgcttccgcctctccgacggcaagtcgctccgcctcctcgctcttgacgccgtcgcgctcgagcttggccgccttggccttcgcccgcccgaccgccgtcgggtcgtacgacgggcagagcgcctttggaccgagcgtacactgatcgcagcgcggtagaacggctttgcagacgatctggccgaagccgacgagtaacggattgatcgggccccagagctcgaccgggagccacgcctcgaggttgcgacttaaggaagagcagtcgatgtcagcgacaggcccagccaggcaggggctacaaggagctgacgcaccggacgatctccgggttcggtttcagcttgttggtcggcgccggatgccatccgaggcggttggtgatgcgctcgacatgtatgtcgaccccgataccgagtgagctgaacgaacgagccaagtcagtcagtcagcacctggttgggaggacgagaccaaacgcggaggccgcactcggaccacgcatgctccaagacgaggtatgccatcttgggcccgacgcctttgagcgcgagcagaccagcgagctcgcgcgggatgtcgccgccgtgcagcgtgaggcagtcggcggcggccagctttatgtactcggtcttccgattggcgaagccgctgcgacgtgggaggacagggcagcagctcagcgatgaaggcctgccggcggccgcagtgcgccaggctgcaggcgaactcacacgcatgagatgcaggctcggacgagcgcgtcgggtgcggcgagcagcgactctgccgacagcccgccgggcatgtcggaccgaagcttttcgaccgcgcgatgggtcatctcgtctggcgtagagcagcaggaccgtcagcgacgggcagagcgcgcgcagcaagccggcagagtccgagacgcacccttcgtttggctcgagagcatcaagctgatgaggacggcgaagcgcgaccgaatcgggtcctgctccttctcgcctgcggcagcgcatcccataccgtcgaccggcgcgacaatgtcggcccgcatggccttgatcgcgtcgtaggcctcgcgccacctcggcggcggggcgagcgtgaaggccgggccatcggcggcgcccttgacgggcgagcggcgtgcctttttcggcgacgaagcagcgtccatctgcggcttgcgggaggacgaggctggcgattcgtccttgagcttggacgaagaggccatagcgctcgagtcgaacggccttttgctcgaggacgattggcggccggcggcggaacgcggtggtgatcgagctgccgtgagctcagctgcctcgtcctccgaggcctcctcgtacttgacgccggtctgaggcttccgaggcgatacgcgccggccgaaggcccggagagtggcgtcctcagtcttgacgcgtgctcgggatgctgaggaggtcgagctactgccgatggcgtccaggccggcggcgaccgacggcgtcaagggcccggcaacgacgggaacgggctcagctggcgtagctacaagccggccggcctcgaggctgaacatcgtcagcttggacattgagcgaggcttggttttgatccaagggcgacgggcgaaggtgaagagtaggccgatgggagagaaggtcatagagggcaagcagccgacgcggcggaggccgatcgacctcgccccggcgtcgaagtcgtcgtgccaggcgtggcgaaggagcagggcacatgtcgtcaacgactcgtctcctttcctttcaccaggcgcgaggccagagcagtgcgctggcgtcgagtcatactacagtcgccgagccccctatcagtcgagacctgcccacgaagctcagcaacccaggccgtggcgccgtgaactgtcgacgaccgcccgacagtcgctcgaacggggcaagtgccatactcaagagcgcatcacaataccagactgtgcatgcgcgccggctgctcaccgccgcatgctgtcgttaagccccccgctggaagcgcccaggctgtgccggagcttgtagacgtgcacggggctgatgtcctcgcccgcgccgtccgacctggccagcggcgagccgcggtaggacgaggtcgatccaccgagcggggacggcgcgtgcggcggcgaattaagcgactgcttaagcgtccgaccgccgccgccgccggacgtcggcgttgagggcggcgaggccgaggctggcagggtaaagcgaggcgtcggggtgctcgactggacggaggatgtgggtgtcgacgagacggacgatgcgagcgagagaggtgacggcgaggccggagcaggtcggatctgtgtgaaggcgggcgacgacgcgcgcaacgaggttagcaggcggaagctcgaccagccagcccgcacgccacggctcacggaccttgggcgagcccttgttcgacaacggcgtcgatcgcatcgaccgactgacgctgctcgccggcagagttgcacctgcggcgataccgccgctcgccctcagcttgcggccggcggcgaacgcattccagacgaaaagcgtgacgacgaccgtctcgaagccgttgacgacgtcgcgcgagaggccgagcgtccggaacgcgagcgcgcggtaagggaagtagaagggcgacagccggaggaggacaaggaagaagagcgcgacgacgttcgtcttgaggaccgagagcagcggcgcccgtcggtgaggcgagagaggcggcggacgcgcgtaaggcgacgcgggcgagaagggcggcagcggccgagacggcgtcgacatggctgctggcgaacggcgggctccttgaagcggcccagctgactgcttggaccgagcgagctgctaggtggaaccgagagcttgaggtgaggcgcggaagggcttgcttacttcggtcgacgtcgctcgcaggagagcaggaggagtgcgccgctcgcgcacgcgaaatcgaccggcagctctcagcagcagcagcagcagcttgctccctccaacgatcttgctctcatccgacggggagttctggctcgtagcagtgccggcactcgctctggcgactggcacgaccggcactgcccgacaccatgctgactggaccgaaccgtgcagctcgccctaccccgcgctttctccccctcagccaaggcccggaaggccggctcgtcccgggccgtcgttaagccggcccgtcttgcttccctcaaagggggatgaggctcgtcctcaagcgcgttgccctctaaccttgaccatcctcttccttctcctctaactagacgacctgccaaagatgcctgccgcctacaccaagaccgccaagctcacgactggcgccgagatcgtacgtcctgctcgctccgcgactgcgccttgtcttgtcctgaccgccttcgccctcccttgcgtagcccctcgtcggcctcggtacatggcagagccctgacgctgaggtctcagcagctgtcgaggccgccatcaagagcggttacacccacatgtgcgtccccgacttggcctgctcgtcagccgctcttgcgtctgaccacgcccgccttccctcccctcggcccatctccagcgattgcgcgtggatgtacggcaaccaggccgccgtcagcaagggcatcaaggcggccggcgtcgcccgcgagaagcttttcatcaccgacaagctcccgtcgtcgcgccactcgcgcgcaaaggagaatctcgacgagacgctcgcctcgctcgggaccgactacgtcgacctcttcctcatccactggccggtcgcccttaaccccgacggcaacgaccccaagatcccgaccaagccggacggctcgcgcgacatcctcggttcgtcccccctttcgttccggtggttcctccctgcttgccggctgacactcacgcgctcttgcagacggctggacgatggaggacacctggaaggcgatgcaggacatccttaagtcgggcaaggcgaaggcgattggcgtcagcaacttctccatccacttcctcaagaagctcgagaagctcggcggcccgcagccgatggtcaaccaggtgcgccgtcggctctaccggagatagtctccctctgaccggtagaccaatctactgacgcccacctgtcggtcctgtcctccctctcagatcgagatccacccctatcttccgcagaccgaggtcgtcgagtactgtgcgttgcattggccgtctttgactctgaggcctgctctgactctcgccttcctcctgcgacctcttctaggccagaagcgcggcatcgtcgttgaggcgtacaggtagaaccctactggctctgtcgacctctgcctcttcctctgctgacaccctcgccctcgcttcctcacagtcccctggggtgacttcattttgtctttatcggcctctgtctatccttctgctgacccgcccgctcatcctcccgcgttgcagctcgacttcggccccgctcctctctgagccgatcgttgtctcggccgccaagaagctcaacacaaccccggccggtgtctgcctctcgtggctcgtcggaaagggcatcgttgtcctccccaagtcggtgcgtccgaccctcgggtcctcctccttcttctccctcgttcctcggtcctgacgcgctgccttccacctccttctgcgcaggtgacgcccgcccgcatcaagtcgaacgtcgagtcgatcgtcgagctcgatgccgagacggccgccgcactcgacgccgttgccgccaaggagggcaagcagcgccgcttcaccaagtgcgtcctcttccttccatccttgatgggcatccgaccgcagctgctgacgtgcgttgcttgcgctgcgcttgggcaggccagcatggggcgtcccgctcggcttcgaggactggggagccgagctctacgagaaggcctaaggctggccgggcgccgcgctgtgatttcgacgcgctccgagacgattgcgctagatggatatgagcttccgttacgccagatgagcaggcttgcagttgggagggggtgggggccagcggcgaaggctcgtctgctctgccgaccggctgagctggggatgaggtcgacacggtctaggtttgacgaaaggatcatcacatcaagcttgcaaccgtcgatctgcgccggctgcgagcggtcgtcaggcccagcgcaagagacagggaggtaggagaggggtcggaggatataggtatgtaggtccacccattctcgtgccgagcctggacggggtgtcgtccggcacgacgaggggtgccccggagttgctctccgtctgctgatagcccaaacgaggttggtttggcccagggagggacaataaaagcgaaggggtcgcgtccccggagggacgcatgagtgagggacaggagcaatggagcgcgaggcggcgccgagcttttgtaggctgcggcggcggccgcctcgctttttcgactccgcgccggccgagcgggcgcggaaaggccacgcagcgggcggcatgcgtgctgctacccttgcttccaccacccgttctccatccacgtctctcttcttgcccaccaactctctctctcttcagcatgctctcccgatcgctcctccgcaccgttgcccggtcgaccgtctctgcccggaccgtctcggccctgccggtcgccccccggctagcggccgccgcccgcgcgagcttctcgtcctcgcccgccagccgaggcttcttcaacaaggccgccgacaaggccgccgctgaggagaccaaaccggcggccgaggctcaggccgaggcggcgacgcctgacgctcaggctgcggaggcaaagacggccgcgaaggaggaggttacggtcgaggacccccggatcgccgagctcgaggccaagctcaaggagagcaacgacaagatcaccgagctcaccgtcagtccctcttcttgccacttgcccattcgttcgaccctgccagctgtacgagggcgagctcttgttggcgactttttgattagctccgagcctgacgcctccgatcctcttattccttacccgcgcttgtcgttgatcccccttcttcaattgcgccgctcgcagactgccatcaagtacgcccaggccgactacgccaaccttcagcggcgttcggccgaggagttcagccaggcctcggagaagggcatcaagcgtttcgcgtccgacctgctctcgacgatcgacattctctcgctcgcgctcaagcacgtcccccagccgattccggccgaaaatgtcgcgctcaaggccctctttgacggcgtcgagatgacgcagaccgagctccttaagacgctcaagcggcacggcgtcgagccgatcaacccgctcggcgagaagtttgacccccacttccacgaggccctcttccaggtgccggtccccggcaaggagcccggcaccgtcatggacgtcagccaggtcggctacacgctcaagggcaagagcttgcgcgctgcccaggtcggcgtcgtgcgtccctcgtgtctccttgcgcgcccttgcgatgtgacaactgactcctagcccgtttcttgcaggtccgcgagtaaatgcgcgatctcggccgcttgtacaacttcgccctccagccctcctgtatcacctttccctgccatagaacgacgccgcccgcatctgcatctgcgggcgtgctttccttacacctcaacaccttcgacacgcaccaccaccacccgaccaaaaaaaaaagagcttgctcaccctgggcgagctcctcctgaaggctgaggaacaagaaggcagcccttctttcccggcccttcgctctggacgccttgtggcctgaccgacccgatgcacgacacctttccgcaccatcccagcgcggctggaaccgaaagcaggcgactgagggcggggtctggcgcttccggggcgtgcgcgaaggcggcgcttttgtctagggatgccatctttccgggacaggggacgtctgagatgcccgaccgggtgtcccaagggctgcctgcttcttcgcgacctcttgagtcgagcattccggtcgagcgcgagagactggacatcagggccagctcgacgagcgcacttgaaccgctgctcttcgccggcggtgagggatcactgtgttggacgggtcagagatggcccgtcgacgagcgttggcttcgaagcaggcatggcggccaagcgcagcgtcctgaacccggatgagggagtcgagcgcccggcgaggccggcctagcgcccgcgatccccgctcgtccgtcaatagacttccgatagtcgatccagagccggctgtgcgtcctgcgtcggccatcggccgtcgcgcaagtgtactcgggcgacagcaggcaggctcagatgtagagcgccgcctcgcccgcgtcaccgtctcgcggcgcgttgtcgccatagacgagctcgggcccagcagcgccgtcggccgaggcgccggtgaagcggtcggtccagttccggcggccatccgcctcgacttgggcgtcaacgacccatcgccatgggaccatgacctgcgcagaagtccgaagttgacagtcagccgcctgctgtgcgcccgcctgcccgtccgcgctcgcacgcaccatgccgacgtcccgctcatcacccgccgggttgagctcggtcgtattgctcaggatgatgttgagctccttgtcgaggcagacgagcgtcccggtgaaggaccggccgtcggcgatcgtcaggcggtagagccggttgagcgtcgcttggagccgggcgagcgcaggggacgcgctcgagttggcggcgccagaagcagaggcattggccggaccatcggaaggagaggccatcgacgaggtcgtccctgtctgcagaagtggtcctgtggcgtcgtcgttgctgctggtcgacgagagcttggaccatcgtttccgactcgaagggcgtgcacgatgcagttcgggggacgatgcagcagacccgcacgccggccgccgccgccgcctcccgacgacgctcgtccccgaccgcttcggggggaccagccagcatctcctccacctgtctgttgccagcgaacgccatgttcatcatcgtccgtcctcaggccgtctcactccttcagcagatctccgtcagctgaccgctctttgctattcgactcacgcaggacaccctcttcggccgaacgctgacgcccgctgagcggctccgccagcaccagcgtgcgcttcagaaggctcagcgtgagctcgaccgtgagcggaccaagctcgagaagtgagtcttcggtcaggaggagcggctgccaggaacggttttcgtgggatcggccggcgttgcgctcggatggcgactgatggcggttcgctcgcttgccgggtcgggtgcggcgcagctcgaccgcgggactgacccgccgttggcgctctctcgcgattgctcgcacatccagtgaggagaagaagctgatgggtgacatcaagcggtcagcaaaagccggccagatggtccgtctcgaacccgactacttgaaattgacctcagcgagctgacgagcgactgctgccctctcccgcaccaccctgcccggcacgccagaacgcgtgcaagatcatggccaaggacctcgttcggaccaggcgctacatccagaagttctacgcgatgcggacccagcttcaggcggtgtcgctccgcatccagacgttgcggagtaaccaggcgatgggcgaggctatgaagggtgcgagcaaggccatgggcctgatgaaccggtcgatgaacctccctcaggtgcgcactggacctcgcctgcacgctgcctgttccaatcgctgactatctgtgctcttcgaacctctgcagatccaaaagatcatgatggacttcgagaaggagtcggcgacgatggacatgaaggaggagatgatgtcggacgccgtcgacgacgcgatggaccaggagggcgaggacgaggaggaggtcgagggtgatcggatcctcaaggaggtcctcgacgagatcggcatctcgatcggccagcaggtgcgggccctcctcgctcttttcccgcctgtcgcgatgctgacggccgcctgttctctggttgccagctcggagagacgcccttggccatccaggctcaggccaacggcgccctgccgtcatcacggctcgccgtagcagagggtgccgacgggcctcccgcgccgagcagcggcggcagcggcggaggaggaggggccgaggaggacgccctccaggctcggctcgacaacctcaagcggtgattctcgaagccgtcgttcgctttcgcttaggactccccagccgcggttttcctctcgccttgtatttttggacctaacctacgcacccttggcggctcctcgcgcggccgagccagcctttcatcttacgagactttctttttcatgatcttcgacgaagcagtgcgattaaagagggagaaggtatacaatatacgagtttcggtaggagaccgagaagaaagagggtgccatcaggggtatgagatgcgtgatggagaaaatcgagagaaggcggcgcgagcgagaacaaaggacaaggctcgggccgggtgctgcgcctccagcgccgtcacgcgactgccctctggcaaccgggcttaactgagcgtcagcgccgtttggccgcaacacgtttaaaaggcgacgggccagcccgaagagaagtcgagtagattgatgcccagggcggatccaatctgttggtaaaaatgatatacgagcagcctgttcgaaaccgcgtcaggtcgaggtcagtccggaaagcggcgttgtggcgaggcatgacgcaccactgcgagccgtcctgaatgacagattgtccgccaggtccgacaaccgagccgtgcgtggcgaggacggtcgtgccgccgccctggagcgcagacacgccgttctggtcgacgtacggcccagtgatggacgacgagcggacgacgcgcgtcgagtacgtagagctgaggcccgaacagcacttgtcaaagcttatttgcgacagagccgagaagggtcaaggtcagaaaagaggaacagatgctcgagtaaaaccggggccttgcctcgagaaaaggtagtaaaagttgccgttcttaacgatggcaggggcctcgatggggttgttggcgaccgccggacgctgggcgatgcgcactggcgtcgcgcccgacttgagcttgccggtcgacgggtcgagctcgacaacggccaagccagtaaagaagctaccgaaagacagccactgccgcgagcttttgaggagcgagtcagtcctagacttcgcgtgagtgtcatacaaggccgcgctcacccgtccgagaagaagtttccgtcgatggcgttgaatgggtctcccgtcttggatgcaaaaacgacgccctgctgcgtgaaggatccagggagaccggtcttggactgaaagacggaacaagatctgttagtggcatcttaggctctttggttgccgcagggagactgacggttgcaaggaagatggccgagttctgagtgccgaaggctgggaggcacacgggcagtcaggtccctgagatcgagcccgagagcgacagaagtgaccgacagctcgcggtgtaatagagccggaatagcccgtttgcgtaatgtacgtcgggtgcccaaaggtcgttgccgcgcttgctcgcgtcgacgtagacgctcgtgccggccggctgggtgtcgccaaagacagagccggcgaactggaacgacgttcggtccttgctagtcctgacgtcgatgcccttaccggtgctgtagaggaagtaggttccgtcggggccacggaccatcgacggatcgtggacggggttgatgttgcccgtgacggggccggggttggggaaggcggcgtaggccgccgagacggcgcatgccaggaagggtaggacgcgactgaagatcatttcgaggcttgagaccggaatggagatggaggggagcgctcagtcttagaagatcagctctcttatggggctcagcaggatgccgccgagggcgggaggcactgtcgcgggtgccttgcatccctgagcgggcgacccctcatcaacggacgatgaactcagaaggatgatggttgtcggcagaggcgagctagtggttgagcggagcgctgtggcggcggccagcggccggacgggcgagagcggcgccggcgagctctgctgccgcgcgggctgtcatcggttgatgccgtcgctcggtcggccggcctaacaacgacagagcccgacggtgaaccatctcgcgctggatccgactgttttctcggtcctgcctctcaccgtgtcagcctgagggcactctgctccgagcaaggcaaactcagggcttgtagctcgccctggctcgcgacgccatgtggctaggcggccggcccctttcgaggttctgttgcgtcgcagccgcccctttcccgccgcacgcctcgcgcaaactcccgccgacaagtcgcctcgagccggatcaacccccgcccgaacgcaggcgcatttgtcggacggcatacaatcacaagcagagcgccctcgcacagactgcgccgctcaagtggccatcgcggcctcctgagcgtccagtgcggcctcggcctcggcaatgagccgctcctcctcctgggcgtcgagccgggctttgcgctctgcgcgctcctcctcgagctcctggtaacgcatctgaaggtcgcgctcgcgtgcctgcagcttcgacacctcgatctcgaggccttcgatacgccggggcgtcgccgcgctctcctgctggcggaggcgggcaaaggcctcgatctcgcgctcggtcttctggagctgctcaaaggcgtcggcgatccgctgctggagttttgcgttgacggcctggtagccgcctaggagcttgttgagcttcttttccgtcttgccagccttggtggcctcgtcgaccatcgcgctcttgtcctgactgatgagggcggcatatccggcgatccggtccgcgggcgagatggccgccgggtcgacccacgaggccgagtcggcgtggaagacgagcgactcgcgcgtcttggcccagctgaccgaagcgccgagcgccatcaggccgtgctcgtccgaatgggcgaggatggtccgcttgacggcctcctcgttcgcgcccgggaagccaagcgaggttgcgagctcggcgtgaacgagcgcccgcgcggtggcgaccgagtcgtcgtccgggccgacatacgacgacgacgcgccgcccgagcgcgaggtgccgggcagcgggtaggcaatggagtcgtgctcgacgagccgggcaaactcgacgtcgacgaggcggagcgcagcatcgcggtcggcatcgcccgtcggggccgagacgagcatgagctcctcgagcagcgccgtcacgtcgacgtcgaccggccggggcaggccctgcttaacggccgagctccggcgggcaagcgccttggcagcctcctcctcggtagcgcgcttgtcgcgcgcgtccttctcagcctggtcctcctccgagaggggcacatcctcgacctcctcctcctcgttggtctcgggcaggacgaagtcgaagttgttctcggcctttggcagcgaggcaaagccccggcggagggcatccttcgcgcgtcggcgggcctgggcgggtgtgtcgccgatgggtgtcatgcccgggtcgagcgagttgatgctgaggttgtcgcgcatgggcgtcctcagcggggtcgccgacgcaacggagccggcctctgaccgcggggtcgcgccaaagtcgatgccaccggtgccgcggaagggcgtggcgagcgggttcggggtcgcagcgaccgagtggttgggcgtcgcgccctcgtagccggtgccgcggccctcaagaatgtgaagcggcgtattctcgtcgccgaggaggggcgtctgctggtgcatgatgttgcggaggttgagcgtctcggccatgatgttgtcgtctgcggaaggggcgagctcgcgtcagtcgttgtcggcacgagttaaatcaggtcgaggccgagcgagacgcacgctgaggggccgtgttgggcgtgcgcgccatcttggcccggccgaggctctcgtagtcgccgagcagcctcgcactcgcctcatcctcgccctcgacgagctcccgactgcgctcgccggcctggccgatcttgacaatctcctcgagctcctgctcgccgacctgcgcctcgggcaggacgaggtgtcgccggttgccaatctgctcggcctcctggagcttctgaatctgggcattccgagcagcgacaaaggttgcgttcttgtcgccgccctctttgcccttgccctcgcgctccttccgagccttcttgcgcttttcctcctcgaccgtgtcggccttgcgcttctcgagcttcgacaggagctcgcccacaggcgcgtggtaagcgcgcgtcttctcggcggaggtgtcgtagaagcccggagcgggctgtttgttgaacggaatgtcggcattgtactgcgagcgaggagcaaaaaggacatcagcaccagctctcaatgtttgggtcgagagcaaagattgcagggacgcacgtccatcgacgtcttcttgtccttgggcttcgctcgggacatgatgccggcagccttgagctcgcgcttcttctgcagcatcgcgagccggcgggcctcctccatctgacgctcgcgcgccttgcgcttggccttcttgccctgcgtgttggcgagacgagcacgggcctcggacagcatttccttctctacaagatgaaaagcggaggggtatgcgtcagcactcgcgttaaagcgttgatagaagcaagcagacggcggtcacgcaccgtcctcgtccatgtcaatgggatccgggcgcgccggcttcgtctccgggtcggggtcgacctctcccggcctcaggcgccggacatcctcggcagccggcgccgactcgggtccactcggaccggcgaggctgagcgactcctcgccctccttggcctcggcctcgtcgagcagcttctggtagcggtctaggcactgggtcgccgtccggccgacgatgggcgcgatcgtccgccactgcgttggcatgagtttggcgaggtgcaagagcttctcatcctcagtctacgagcgagcagaagggccaagaaggtcagctacttgcaagtatgaggctccgaggagcggcggcaagggctcggcacgtaccttcgaccactcgaccttcttgatggacgggtcgagccactcgtaccacctgcagcatccatcctgaagtcagcctcgagctcaattgctggattgatcgcagggcgtaccgagctttgcactgcttgggcgtcttcctgacgagcagcgacgagatacgggcccattgctgatcacgaggacagaggcgtcgaggcgaaggtcagctcgagctcccggcctcttggcggaccctttacaagggcaactaacgttctttccatacttggagatggccgccttgaggatctcgtcctccgtgttacgcctggcgacgcacaaaagaaaggagaccaaagtcagccgactgatgcggagcagcgtctcgggcgccgacaacgagaagcggcaaggccgagcgagacgacctctacgctcccctcccgctgccgacccatacgaacgcaccagatgcctcccttgatgatgattctgaccatgaccgcgagtagagagacgcgtccggaggcgacgagctgatcggaaggaggaggagggtcgaaggaggtgagtgaggtcgcctccgttgggctcgccttgcgcgcgaggacgatgcagatgacaggatcgagtcgttaagagaggttcacacctcagtcgtacacgtcccgacggacgcactcgcagaacgcgctcgcaatgagaggagagggtggcatgctattgcgtcggtcgggggtcgcgatatcaggttgagaagaaactgcaaggattaggaaagatcgaaacatgggttggccggtaggtcctttcgactgcgcaccgcccgccgaggcgtccggtcatgatcaagcaggcgaaggacgtctgaacaagaaggaaggtcgacatgctatgtggtcgttcgtattgtgggcgagtcggcggtcgtggtgtcgttgaagaagccgtgaggcggaaggatagaagggcggagcgaagacgcgtgctcgcaaggacgcgtcggagggctcgaggtgcgtgcatcggtcggccgccgcgtgcagcgacaacgagaggcgttcaagagccaacgtcactcaaaagcctccgtcaggagcgggcccgctgatcagctgcaaggctcctcgatatacccagatgatgatcgacttacgaccgaagcagccgaaccacagttcgaatagggcctggccgccaccgactgagcggcggtcgagatcgcgtgcgagctcgcgccacttggcagccgacgccgaatcatcgctggctgcataggcctcggccaggagactgcagccgacaattgtactgatgaggaactggtgcggcggtaggaggccctcgtcgacgagccaggcgtcgagaccggtacaggagagcgaccggctgtagtaatgaatggctttcgctgtccacgagtcgagctccgcatcggtgggcgtgcgagtggcaaggtcggatgctggcccctgatggaagcttcagggttaggatcgcgacgggtctcggctagatctcgagtgagggtcgacttaccgcctgggcgaagagggggatgtagagctcgtagcagccttcgatcttgctgatcgacttggtgacgacgtcgatgaccgcttcgttgcgctcaaaggcccggatcttctccgccaatttttccgaggtgagccgtttgcgctcaaagccgagcgcattcagccggtcggtgatcgttgggctgcctttgccggacttgactgcctcgcaagttacgcagtcgcaagcgtcgacgccgcgccgagcaagagctggctctcccgggcctgcgtgctgagcatagtcgacgagtactaagaccagaacgaggcagggtcaggagggagccaggctaccttccccggaggcggaaaaccagacaaactttcgctgcccttcgagatgctcgtcgaagcgcggaaaaagaccgcgtcgccgaggaagtgccagaacgtgttggcctggcactggtggttggggaccgaggcgagtgggaagatgccaaaaggctcagacgccgaaggccaggcggaagccggtggttcgtctgccgggcgcttcaatggccacatgcggaacgccgcattcacgcgacaatctggacgcggttgatgtcgacgtcgatgagcggcatgtttgccgggacgacgggcttcggcgtaaggtcggcaatggcgatggccgacggcgacgggtacgacggcgaggccgagaacgcatggaagatgtctagcgacgaggggtcatcgacgaggctggcagggagcagatacacaggacagataggtcaggatggccttgcagagcaagacggcaaaggagggtggcgcaccattgggcaattttgtgcgtcaggtggtactgtgacaaattctggacgctgctggcgccgtccttgaggacaagcacttggaggtccatcacctcgcccgtctcgtccagggtgcacgacagccagggcttctggagaagcagcagctcgcccgtctggacatcgcgtgtaaccgatagacctcggccgtcgtggccgcggaaggacgagccgatggtgagcgccggggagatccagtgggcgacgtcgaccttgccgctgggcttctgcgaggcggcgtagagagccgcaaagtcgaactcgcccgtcgccgcttttgacgcgggcggcgaccttcggcagctgctcgcgtccgtcgagcgaatacgggaaaagggcgaggagctcggcgaagcgttccttgcagaggtcccacagccggagggtccttggccgccatcgccgacagcaggagcgccttttcgaccaggccggccaaaaagcgcccaccggtcgcgcacaaggatcgacgcagcgtcggccagggctgctctcggccgaccaacacggagccgcgactggccgcgctcgaggcggacagccggggcgtcgtcaatcttgatgccaggagtgaaggcctggtcgacggtgttgaggaagcccttgacagcaagagtgacgccgcgccgcttccaggcttctgaactgctatgcgtctcgggacggacgtcgggcgcgaggaacgagtcgcgcaggtgacgccggcggcgaggccttagccctcggtgacgaagaggaagtcggtggccgagtagacctcgacaatcgtcattgcggcggcctttcttgctcttgtcttcgtacaggtgctcgcgcagggccggctcacgcaaggcaatgaccgagccgagcgcgaggatgacgttgagctcttcagtagacgtgccgagcgcccaaggcgtgtgtcaggtgtggacggtaacgctcgtgccggccgtgtcctcgctgggtcgagaggtcccaaaagtcagcaggtatgagcaagagagcgacaagcggcaaggaagacgcacgcgacaaagacgagttcctgatttcgatagatcggggagatgacgcgaagaagaaggatcgagccctggaaagggccaaagcgcgcgacgaggtcagtgcgagcgaccagagggagagtcgactttgcaccgacctcgtgcgtcttcgagtagaccattgctttgagcgtgatcggcataagcgtgccgaccggcgtcgtcgagtggtggaagctgcagtgggccgacatgagcccacgcggccgaaagccatccttgcgtgccgcgtcggctcgggcgacgagcatcgcaaaggtcgccaggcggtcctccgttgaaggccctgcgtcgacaagcacgaggcgtcagcgagcgcgtggcaagacgctcactcggcagatcctcagcttacagtcggaaggcctgcgaagaggcagacgaggaggtcagccaaaagctcaagagctgggcctcggcgaaagagggggacgcactcgggcatgtacggcgggtcggcgaggtcgcccttcggtgagagctcgatctgagctgcctgctctttggtccgcgaaaacatgcccggagtcgccagctttggggcagacggaggatcggacggcatcttcaagcctaagacccggaccgcggcctcgaggccggtcggcaggccaggcagggtggtgccgggacggccgggcccggctgggccgtcggtgtagtaaacgaccatgttcgggccgacctcgagcttgcggatgggcgacatgtcggagggaggagcttgcggtcggctggacgaggtggtgataggcaagaagcgagctcgaaaggcgatgaaaggggtgaagggccagagcgactgcgcgccgccgccgccgaccggccctgtctgccggtgtcagctatacctcgcccttttccaagtcagccgtcacagcacgaaatgaagaaagcgctgaagctagagagaggtcatgagagggtgaggagtagcgcggcgagcaggcagaggacaacaggttggggtgggggcctttccagcggagaggggggtcgagcgtccagagaggccgaggggtatagcagccggacttcgagcaaagcagagcagaggaagggcagagtgacgcaagtgggcgaagaggcccccggagggcgagaaggcagtcggtcggtcggtcggccggtcacttcttcatctcgttgaggatggcgtcgttaaagtcggcgagcggcaggagctccttcttgtcgacgagctggaactcggtcacaaaaagtaggaagtgccggtagttggtgttgaggtgcgctagatgtcgaaaagggaggtcacgtatcgcgtcagcgttgatggggggctggtctagaaggaagtcgggcgcaccctcgatgccgagcgcgcagatctggtcaaagtgcgaggcgtaaatgtggccgtagatccggaagagccggcggaggatcgtctgacaaattgcctggaaagactttgggaacggcacgcctgcgagagacggaaattcagtatcggagacaggtccacgctcacgcgcatgcaagagagcacgcgagcgacgcaccaatccgcgaggggaagatctcttcgtcatcgagcagcgattggacccagttcatcagcgcgtcgacgtactcgcacgccggcagtgccgtcggcttcttgtacgtcgtgccgtcctcaaagaggaactcgaaactgcgagcgtgatggggtgacgaggggggtcagctgctgcgcgccttcgccggccgcggcaggggaatgaaaggctcgacgcaccgagggccggccgacatgatgggacactgtcgaggtacgcgctggtaggttagagagcgattcaaagaagaggccgagcgttccgacggaccgtctccttgttgcagaactcggcgatcgtcccgtacagcatgttgacgtggttgaagaaatcgacgactgcaccacgcggcgctgttgagatcagcttcggacccccttcagctacaaggcggatctgggactgactgtgcacggcaacccactcattctcatcctcgccctctggcaggcgcaccgcagcccggaggttgcccgagccctgtcgtcggccgcgagcgagagagcaggcggcatcagcatcgagctcatacggctctgtgcgagcgtcaggtcggccacgcacgagcgtcgactcggcaaacttcttgagttggtactgcttggtgcccgacggagcctgctttggcttgaaggctggcggaggagcgtcaacgacaaggacaggggagcaagcgcgccgtcagagggtcggcggccggtcagagctcacttcttgtgcgattcgagctcctggagggcgaggacgagcgtcaggtcagacatctggacctcagaaaatctcactgaaccactcacagcgagaaaagggacgacatggctggaacgagcaggagggcgggagtgactgtttgcgggcagctcaaggacgcgccgccgccgtcggtccttcgagcttgcccctgacgtcgaccctcggtcgaatctctagccagcccaagattccgaagctctctctgcgccaacccagcacgatggccgacggacaacccggacgtcctacgccgctcgacattccagagctggtgcgtgtccgtcgtctagggaggcctggtctggcgcaggtcgttctagcggctccaacgctgacgcccgggttgtgactcgcctgtcaaccgcatcagctcgccaatgtctttgaccagatggcagacgatctgccgacgctcgccaggtgtgcgcgtgtctgccaggcctggtccggtcgggctctcgagtacgtggtgcggaagccgctccgccctagccctcgcgctgaccgcgccgcctccaccttcgcctctctacgcgtcctccaacctgcaggtcgctctggaagggcccgatctgggcgtcccagctcacgacgctcttgccaccgtcgactgcgtcagcgacacccttcaacctgccgcgggcgtcgtctgatccgctgcgcaaccagcgcttcctgctgagcatgccgactgaggccgagctcgcgcggctcaacacctacgcggccctaatcgagcatctacggttcgacgagagcgacgccatgcacccctggatggcggccaggctgcagtttcccaagctcaaggtctttgagtacgtccttcggaagaggactctgccatgagaccgcggctgacgcgtcgaacgatgctgcgctgcgccagggcccagcccatgctcgacctggaggccatcctcactctaggcccgctctgtggaccggtgcgcccgggctctcgaaccatactgtgtcgcaactgcaatgcttaccttttgattctggactccacagcaaatctcgcgtgttctactggatctggacgagcaagatgacgatgacgatgaagaggacgacgaggagattgatgacgacgacccggatccggtctggggcttcgttgagcagtaagtgagccctttcttcacatccctaggtgtatttatctgacgccggcgccgtctctgctaggtacgacactgccgcatcgtactcgctcgtcaaccacgtcgccctctcgtgcccgagtttgacgacgctcgacctttgcctcggcaagaagacgagcgcaaacggtgtctttcctctgctggctcctctgaaagaaacgctcaagcggctgtcattcctgttcccaaatgccggcggccgccacgcgaacccgctcatgctcgaaggtctgcgagcgctggacggcttcgaggcgctcgagtacttggagttccgggtcgaggatgtctctgcagccaaggcaaccaagaacggtacccggccgctcaaccttcctgcgctgcggaaggtcatcctgtgcgtcgaccttccgacgtgcgttctcatgtcagccgctgacaagcctccttccgcgtaaaccttagcaccgacctctcgaccgagcagctaccttccttcctcgcccttctgccggaaacaatcaaggagctctcgatcttcgagccggccgtcgtgcccaagtaccgtcgtacagacccgacggccaccttttgcgctgcactccgccgtttcgccacgctcgaatcgttggagctggcgtcgcatcacatcccgccagagccgcgcaacacactcgccgatcttgacttccttaagtcggtcctcatcaccgtcgtctcggcctttccgtcgctccaggcgctgcaatttggtctcggtcgggccgagttgccaaaggaggcgctcgtcagtgtcgcccaggcgctgcccaacctccggcacctcgccctcctgaccaaggacctcgacgcggccgacctcgacgcgctttcgcatacgctgccttcgctcgagtcgcttgccgtctcggcctgggttcggctcccgtacccgccgcccctggacgccggcggtgagccgactgacgaggcccgggccgcttcgatcgcagccgcgggcgactggtcgtttgccaagatgcggcgctttggcgagttctcatccgagcagtcgacgcagcggccggccggccggcgcctgctcaaggacgtcgtcgagcaggacatcttctttgccgagcgcttcccggccgagtgcaagtttggccccgtccaccctctgaccgagcactatgtgcgtggcgcctctcctcgagcctctttgcctgcctcgcctgcctattcctgacgtgctctcacccgcctccaggttgaggactcgttcctctgggacttccaggaggcccgcaacggtcctgcacccgacgacggcaacctttcagacggcggcgacgacgatgacgacgacggctcggtcggctcggacggctccgagattgacgacgcccaaatcagcgaggacctctaccagagctacatcggcatgggctacacgccagagatggcggcggcgatgatccagacagaggacgaggagggggacgaggctgccggcgctgagggtcctgctgaagactgggatggcgacggcgctggcgagtggactgacgaggacgacggcttctagatgtgagcttttcctctgcagacgcttctcgagcgaaacgggatcattggtcatcaggtcggcgaggctcaagcctggaccgaggcgacagtcttggcgccgggcatcgtgttctggaggatctccttgccctcccagaacctgagagacagcaaaggaagcgccggcaagggtcagcgagcagaaggaagcaggcgtggcagcggcagcgaggacacaccggggaatgtcgtcgccggcgtagaacttgcgctcgacgccttccttcgtgatgacggccatgcggatgactccaccggaggacccgtctcggctcattgctaggctgagcgctgcaggagagagaggatgagcgagtgatcagcccgagcttcaggctcgcagcggagcttaacgagtgcacgcaccgttgcggacaaattcgaccgtctgctcctggccccagccctcctggtacgtcgcgtcgcagtaaccgtagatgtaggtcgagcccgagccgccaatggcccacggctgacggaagaggccgccgccgaggggaatgttgtagaccgacggtccgttctcctcgtcccatctggcgccgccaaaccgcatcacacggcgtcagccgaacgtacagggaacgagagctatgaatgggaagagacacgcacccagcaacgatgatgcccgccgagaggttgtccttgttctcgtagcagagcttctggaagatggacgcggccgtgtgcaccgaaggcggcgcgccggtcgaggccgcgaacatctgaagctggtagtggacaatgtcggcaacggcctacaggatgagaagaggagctaaggttaggaggggcgcgtcgacgatcgtagcgacccgggagagcagccgacggacctgggtgtcggccgccgagccggagcggcagcagtagacgcggtcgtggacgaacgtcagcttgtccgtcacgcggttggcgatgtacgatctgcagcagagatgacagggggtcagaacgagaaactggcgagcttcgagacggcacgatgatggcgaggcgagctgcgcctgccaggctgcgtgcgagctgccgtcgagctggaaggggaggccgacgcacccagacgttgttcgcgagtcggcaccgatgacaacgccgccgtcaaactggaccgccatgattgacgtctagaggggtatgccagagcgtaggccatcaatgaagatcagcaaaaccgtccgaggctgaaaggggcggacaagatgtctccgtgaagcagggcacctacgagcccgcaggctcgtggcggagaggggacgcacgccgagattgatctcgcccttcttaagccggtcgatgccttcgcgtccgatctccatcgtgagagctggttcctgtcgaggcctaggtgagggcaagggggtcgcggagggcttctaggtctggcgggaaggctggttgtctggtgtcgtcgggagtggctgtcgggctctggctgagctgccagcatctcgttggaggtcgctcgggcaggcgccctgtcctcccaaccacacccacgcctcagcctgcctttgccctctctctcttcgccctttcacacagctctctactcgatcagcaccgccatgccgctccagcagttgtatcaggcgcttcagcaggcgtttgacgccaacgacctgacgtcggtcggcaagcagctgccggcgctcaaggtccgtcagctctccgtccgagccagcttcagcagctacctctcggattgcagacgcagcactgacgcagcagggttctgcgctcgacctcctttcagctgctcctgacgcagacgggcctcctgttcccaacgggccaggcaacatcagccgacgacctcgtcaccgcccgtgagatcgccttccgccgcgcgcacgcgcgagctggcacgctggcagcagcacctcggctgacccggctcttgcctcgcgttcgcttgactaggctcgatcctcgagatgggtgccttccactcgatccggaccggccagatttcggcctttgagcggtacatggcgcagctcgagtcgttctaccagtcgtgcgtccgctcgagcacgctcacctccactctgcgtggcgaccgcgccgttacccttcgcagtcgctgatgatctcgccactgttgtgcccccaggtctgacctgccggaatcgcctcggcggccgtcgctcctctcgctttccctcctctcactcctctcgacttcgcgcatctcggccttccacacgctgctcgagaagcttccgccagcagagctcgagtggcccgacgtcaaggaggtcgtcgagcttgaacggggcctgatggagggcagctacaacaaggtctggcggatggccggtcggctgatggagaaggagggcggagggctcggcgtccttgccgagggtctcgtcggcagcatccggttcgtcccagctgtcctcagaccacgccgcgtctcgtcgctgacgcttgcgctgtccactaaggaacgaaattgcgctctcgttcgtcaactcgtacacatcgctcccgatcgcctcggcccagcagctcctcttcttctcgacctcgtctgaggtcattgctttcgcctcgaagcgcggctggacgctctcgccctcgagcgcgaccatctacttcccgctcagccagcaggccgaggcgggtggtgcggaggctgaggagggtaaggcactcatcgacgaggcgctcggctacgcgcgcgtgctcgagagtattgtttagacggttgggttgcgccgggcacaagggatgctcatgaccgatcaaggagacgcgccgccgccagcaatgtgaggctttccttgagatgtctgccgcactgcgcttcgctgctccggtcgtctccgtcgagacgtgggctcatcttgatcgtcattgggcatgtgaggattgaccaggccggcctgctgagcgggcgtcggggccgaggttttattgggagagttgggcaggcgtgagcgcaaaggaagggacagagggcgcaggggtacaaggtccgagttctaatatagcggtgaaagagagtggccgggccgggtggacgcggccggcggtagcggcacgccgaggcgattccagaagaggaggctgccgagggcggagaagcaagacaggacgaagacggccgctcctagagaatggtgcaggccttcttgttacgcttaccgccattgcggccgcccgcctgcttcggcgagaggcatgcccggatagcctcgtcaaagacattctgcgaaacagagtcagcatgagacctggtcagctctctgttcgcccactgggtggccttgaatcttagccccctctctgagcagacgaactgcaccaagactcaccttgaggcccttctgcgtcagtgccgagcactcgaggtaccgcacagcgccgatctcgcgcccgcaggccatgccagccgggtagccgatcggcgccatccgccgttcgcgcagcttgttgaccgtcgcagggtcctcgcgaaggtcgagcttcgtgccgacgaggatgattgctggaacgtgtggccggagaggttagcgctgggcggccctgaatggccggtcaggtcgactcacggacgccgggcgcgtggtgcgcgacctctgggaaccactttgtccgcacattctcgaacgatggaggcgagacgagcgagaaacagacgaggaagatgtcggtctgcgggtacgagagcggtcgcagccggctgaaagaccgttcgagaaggaaggttggtcagaagctggtcgggcagctgcgcggtcgcgcaccgctttgacgcactcgtagtcctcctggccggccgtatcccaaaggccgaggttcactgtgaagcaatcaaggatgagtaatcaaggagagcgctcgagctgggcagcgcgacgaacccggcttgccgtcgacgaggacgtttgcgctgtctacagaggccgaggtgggacgcgggtcagcttcggtcaaggcgtctcgtcgtccgaacagggcggctgccgcgacgaacagttgtcaaagacggtcggcacataggactggtccagcaaatcgagagctatcagtactgtacgcgaagcgtagccttttacatggtcctgcaaggtgacgcgagcgagcacgcactccagggaaggcctgcgacgggggggagcggtgacagcaagcaggtcagctcgacctgggtacggcggcgatcggcaacaagcaggaggacggacgttggtcgtataggatatcagtaagcacgtctggaggcaatagagaaagcagccgtcagcggtctggcaggcgttggattggagaaagagagagacgaggcgcgcaggcccggagacgaaccttgccgaccgctccgtcgccgacgacaacctggacgagccgaggagcgcatcatttcagttgaattccggagcagcaagaccttcccagcacagtgctgagcgtccgacgtacacctggcaagacgagcgagacgggcaaggaggtcaaccctcggtcgttcgatctgccgggaggaggccgagctcgcgcgcctcccgcctggcgagcctcggagcggcagatgggccggctcgcgacggcctactaaagaactagagctagacgtacattttatgctctgcatgccagtggtagccatgatttgctgctctcgcccgtgctgatcagagtagaatagaggtcgaaggctggtcggaagggagctggtcggagagagagagggcagcgcgggcggcgcagggcgactctcgcgcgccgacacaaagggcgcagccagcgccaaggggccccgcctcgccctcgcaacaagggcacattgctccatctcgtcgcaggacgaacgtcaagtgggtcatgattagtcgtgagtgaagacgggccggagcgaggaagaaagaatgggtcggcgcgatctcgcgggggcagctcctccggggggtcctatctgaggtgtgcggcccagcgcaggtcaaagacgcggtcgccggcgccaacgatgagggcatcgaggacgcgagcagcccgggcgttgtaagcagctgcgtcgtttgtcgaggtcaccggtcagcatgtcggaagcgcgcgtaaagggatcaaacaggcttgggtgggaacgtactgtcggaggacaggagcagcgtcgagatgagcaactcgtgatactcgaagacgttgacaaagtccgagggtttgacccgtgctcccgtgctgagcatgctgacgactggcgctaccgagccactgtcgagcgtgatgtgcgaccaaacgacggtgtggaccaccgctttcgtcggctcgacgaggtcgtccgagatggccacactcatatcgtagagcaattggcaaacggaggcagagtgtcagtcattgaaaaggcgcccagcgtcagaacaagagatgaacagtgatgaagcgggtcaagggcacgagggccgaccgcagctcgatcggatgtgctggcgggtacgtcgccttggcgcggtcgtagaggttgcgcaagtccgaaatgtaggcgacctgagaagaggagctcagttcaagatgatagtcttttgagtcggggtagtgcgagagaagctcggtccggaggttgcgctgctcgacctaggccttgctgtctgctgcgcaaaggcggcattcgcacgacgtgatgccgtagggctggagaagccgcagacggccttcgagctgatcgaccggaggtttgaggtacgagatattgagctcctcgttgggcgacaggttgcggacgggccggacgaaagttgcgtcgccgatgaagcggacgacgcagttcggcgcgcacgagtggttgaaaagggcggccgccgtgatgagcgcggagggagcggcccggtggtcagggccggaggcgaccgtgtcatccgggcccttctctgcgaggtagagagagaccggaccgagctgcgtcggcgtaaaggcgttgattaagcggacaagctcgatccgagcgacgtcaatgtcgaccggcagaaagttgccgacgtcagcctgcggtttgaattttgtcgcgagcgagaatgagggcggagccggataggtcgggccggcgtagaggatatcgatcactctgttgagcgacgggtcgtcgagaagcctgaaggagtgacaggggggggggggttagacctgagagacaggacggtgggcttcggacgctgaacccaccttgccgcgatcttctgcgtcggcgcagagtcggtcgcccgctcaaactggccgggcgatttgtgtaggttggacgcgtacagtcgctggcccttgtctcgtgccagtaggcggaggaaaagggcttctgcagcaagacgagttcgccggccgtgatgggcttgctggcgacgaggccgcggcccttgtccttgaggtcggcgacgcggatcgaggacgagacgtagtcggccaagtcgacgtgcgggtccgtctgcgaggcaaggtatagcgcctcccagtcataccgaccggtgcgggcctccgccttgcgcttggcgacacggttgagaccggcaatggcatcctccctggccgcgccttcggtcgagagcgatagctcgcggaagcgtgactccaagacggtccagagctgaagagaaaggcggcatccgtcgcgcaaagtaaggccatctcgcgctcgactggcgttgactgaggggacgaagagttgaggccaaagacgtgctcggcgtcctggagcgaggaccggaagaggccctgtttgcctcgagtgcgcgagcgcagaaggcggagaacaatgcttgacgggtctcgctcaattccggtcaaaatggttgcgtcggctgccgtcagccagccttggccgaggtaaaacgggtgccgagcttgtactagccgtctgtcgtcacaaaagcgaggcgggacgtcgatagccgattgccaaatgaagcccggtaggtcgcgctcgggattacgaacctagacgatgtcggtcggcgagatgacaacaatctgcagggagatcaaggagcgtcagcgagagtgaaggatagcaaaactggctctcctgacgatggcgtccggccctgcacgcgaaacgggtcgcccttggcggtgacgaccagggtggcgccgacgtaaggctctcacgaataatgcagatgtgccaaggtgtagcatgatctcgacctcggcctgcgtcgtctgcgagagcggagggccgcgaagggcgacgtaggccgcagtgcctgaggtgtcttggctgcgcgcgtgaagggcagccaaagccgcgtcaatctgagttaggacggcaagcctgcagtggaggggcacagtagctacaactgaccagaagatagtatagccctcgcggagtttcggccgcgagacgatacggagaaggagccagcggccggcgtgccgcaacgggaccgaaaggccctggaggttgatccgcttgagcttcgatagcggcgtcgtcgagtgcggccgagacgtcgtggcgcagagcgtgatacggttcaggctgaactttgcctcgcgatcaccgtcaatcgttttgaccatctgcttggcggtgaagccttagacgggcgacaggggaaggtcgtacgtcagctcagtccccctttcgacgaccagaatgcccatgaggcggccgaataagccactcacgccagctgagcgaggtcgcgccacaggaagaagaagaaggagaagcgaagccttcagtagctggtcgagcagctcacagctgagaagtagaaggcgctcgagtggacgtactcagccttgcgaggaggcgtctcgcgagcccagacggcctcggcctctgctctcttcagggccttgttcgacatgtagacctcgggagcagctttggacttggagctggccatgtcgagccaggcgcagagatcgacctgctggcggaacgggctgtcgaggaaaggacgaggagcacgacgagagataatggtcgaggtcaggataaaaggggaaggcttgagagcggagctcggcgggccaaagcgcgcagcagaccgcgcgcgaggcctcgacacgacagtcgcgatccccaccgttgactttgcgcctgacaggaggaagtgaagttcgaaggcatgcaatgggggtagaggctacagtgctggagatggtgcgtgggtgaatgagagcgagtgttcgaatttgagggggcggcgcaaagaggatgtgggctcgggcggccgggggcgtgtacaattgggtcagaaatgcgaagaggcgagcggaaagtgcaggagaaggggtcggaggtcattgaggcgggtctgtgtgtgtggtcggccagggcagaatgcgggagagtggtggccgtgaagagaggccgaggggaggcgtgcgtcggagcgagtgaagcggaacgaaggacccgattgcccagagtctatgagaagggaggtcgagaagatgccaagagcggccggcgaaagttgcgagtagtgtggggaccggccgagtgaccgctcagccgccgctgctggatgagacttcgcgccgccagcgctcgacccggttgcgcttggccgtttccgggtcgacctcggccgctgagggcggccccggcgcgacaggcgagagcttgactgacgcttgctgtgcggcgagcgcttgcgagggaactgccgagttcggaggctgcattgacgggagcgcgttggtgtaggcaaagacgcccatcggctggaaggcctgctgcggctgctggagctggtggtaggaccggctcggctgctgctgctggtgcgaactgtacgcgaccggtggcaggaagaggccggccggctgaagggcgtgcggttggtggtagatcgggtgctgctgaagcgcagccatcggcggagggagcatcgtgctcggcgatgtcgcaaacagctgctgctgctgctgctgctgctgctgggcgtggccgacgagcgaggacgaggccgatgcggtcggatagcggccggccggcagcgtctgcatagggatgaggtacggcggatggacgtagccggccgtcaccgacggctgctggaaggctggccgttgctgctggatgagctgataccggcgcggaccgtcggccatgagcgagcacacaaagagctgcttggcgcccatcgcatcctggccttcaaacacccagggttggccgagaatctccatcggagagccgcccgggttgagcgacggtaagccggcgacggctccgggcggtccagcccaaggcatcgttaggctcgggagcccggcggtcgtgctgcccgtgttaggccggtgctgctgctgctgttgctgccgaaggtcgccgccagggccggcatgaagccgcttcgtcggccgactctcgaggtcgagctgctgcgaggcaggaattgggctattggacggcgagaaggcttcagctgcgcgtcgtttgccggcctgctttcgagaggaggacgccgccgacgggtgcgaccctgcggccaggtcgtcgaccgtccgatgcgaggccggcgtcgagatggccgggttgacgttgacggtcggaaccgagcccgaaccatcgaatgacgcacgcggcgtcgcctgacctgtgcctgatgggaaggtcgtgccgaagggcgagagctgcgacgacgacgccacgagcggcggctggaggccatggccggcgacactgtacggttgtgacgaccgcggagggaggtaggacgggtggagctggaagcagtcgaccggctgcggggcgccgaacagcgggggcgcatacgggtagggctgggcgagctggtgcgggtggccgccaaaggcaaacaacggcggccgagacgactgcgagccgtcagacatgggtcgcgtcgcgagcgctgctgccgctgctgcagcctgctgctgctgttgctgctgtgcggctcggagagcggcgaatgagcggatggtctcgcgccggctgtgactgagttcccaaaggcgggcaatccaggcccggtactcgtcgggcgtgacgtgcaggtgaaagccgatgccggcgagaaattggcctgtgtcgacagaagacgtttatcgtcagctcgggcaagcgccgcagcactaaaaggtcggaaaacgagacgcacgctccatcgagttgatgtcggggagcggcaggccagaaatggccgcccacgtcgagttggtgtagttgttgtcgtcgacgcatctgtcgatcggcgagtcgacgatcagtgaccggtcggtcccgtcatgagtgcctgcggcggggcaaaaaaaaaggggcgcttgcgactcacttgttggcgagcatgagcgaggtgacgaagagccggtactcgttgcccccacgatgccggccgccggcggccctggcactcgcgacgcagacgcggcgataacgctcgagatagaggatgccgagcaggacggccggctggccgacttgcgtcgtctggaggacgtaagcgataaacttgacaaattgcggtgaaggcaggatgtgcttgaggagctcgcgcggcgacggcggctgggcctggtgggtcgactgctgctgctgctgagccgggtagcctgagaggttggcggcggtcatcggtgccggtggcgcaggcgagtagagcgtcggcatcgacaggggcgagagcgcagccggaggaccgccgttcgcgagccgctgctggccggcgaccgccgcctgggcgagcgtcgcagggtcaaagggcgacgtgcctggcgaggcgagcgagatgggcgagagcgaggccgggtagttgcccggagatgacggcccaaaccaggtgtacgaaatcatctcggctggcgaaaggggggtcgaagcgtgaatgagcccagccgcgtcagccgagggcggtccgaggcaatcgctcaacgacaggacctgaacgcaccagcaaaggctgcgagctcggtctgcggctcgaccgtgggcagtggcatggccatcgccggctgacgctggccgtcgacaagcgaaggcggcgaaggcatcatgtctcttggccggcgaggaggtgacgggcggcggctggttggctgctgctgctgctcgagcgagcggcggcggcggcgacgtactcgtgctttctcgcgcttgttcgagctggggtcgagagcgggcaggaagcaagcggcgaggcggtcgacagtccttactcgggaggaggacgaggtcaaaggcttgccgagcgagcagcaagcagccgctctctttgagccgggttgcgtgggcccgggagcgccagcgaagggggtgtctggtccgggcggccttgtgcgcgcgcggcgtcgtcggtgggcgggcgaaggcggcggcgaagcgaagcttgcggaggcgaggcgggaagaggcacgaaagggtcgagatggtggtcggacgaaaggcgacagcgagcacgagcgagcgacagacctcccgtccctgctcgtctctctttgctggcgtcggtcggccgggctagagcgacaggagactgcttcttgggtcgtcggccggaggcgcagtcgtcgcggggatcccgccgtgggggccggccgctctcagcacgaccaacaagtcatgagggatccacggcgcgacaggagggggttgcgccgccaacgccagcagtcgtcgcccgccgtcagcggcaggcaacgtcgagcacagacagcgcaagcagcgagcgacggagtacgaagctcgtagctgtcgaatgagctagggagaggcgctgctggcatctaaccgcatcacacaacctagccaaacggcggccaatcgcagcagccaaacttgacggttcgattgcccgcgggccggagtggctttgccggggaaaggcaaacgcaagctgctcctctttggttcgaggcccctcgggctgtgaaaaccgacgggggcttatgaagcgagagagcacgacagcagcgggccgagccgtggagcaagaacggcagcgaaccgcaggcccaaaagctcaaacagagggcggggtcaggcccgtcggtcagagcccgtcctgctgctgagctcagagcagcagaagcgtcgcacttctcaggaacctgcgcaaactgtcgagtgcccagctgctgcacggcgtgggctgactcgccaagagcagcccgcgctggtcaaggagcgcgatgaagctgcggcggacctttcggctgacgccgagcgtctacgctacaaccggtgactcctttgtgcgcggccagcagctgacgacaagggcaggatgaccgaccgactctaaccgtccgacctgcgcgactgaaagtgtccttcaccgagccagtcttccttccagccctcagatcaagaacctgggcgcatgcatctgcggttgatatgcgaccctacggtcgacgccgtacggtcctcaagcctgcgaacatgcctcctcgagcaggttcggtcgtcgaggagtcgagcgcgccgactccgctcgatgcccgcagcttgcgatcagccgttgcgccttgatggaccgcacgaggctgccctcagcgtccgtcgtgccagtcgattgcgctgcgaccgaaggcaacaggtgcgaccgggaccaagaggagggatcgccgacgaattcgggcgagcccgatgtgccggccttcgtggcgagtcgtcgggtgacgccaaccgcgcctcgccagcttccggtcaaaggccgctactgcagttgctggccgtcggcgcccgacacgcccttcatgacctcgtcccagtcaatgccggccgagccgtcggcggtcccaaagaggtcgcccatgagcgagaggtcgagctcgccgagcatcgccgggtcgaacgccaggtcctggccgccgggtggcggagctgggtaggccgagctcgccatcggcaagtcggttgcggcgccagggacgggcggtgcagtcgctgctgcgccggctgcgaatgaggcgccgtcggcagaaaaggcgccaaaggctggctggctggccgactgctggaacgagtcgaggatccgctgagcctcctcggacgtcatgccctcgacgtcggcggctgtcagctgctggcctgtcgcagcgttcatgaacggctgctgttgctgctgctgggtgcttggcgggccggaagagccgccgggaaggaagtcagacggctgcggcatgggcagcttcatcgccggtggcggcggcgggactgccgcgggtgcaggagcgacaggtgtgacggtagctgctggcgccgaggttccgattgacggcaccttgaccgcttgcggaggacgagaagtagaagcaggcggtgccgccgagggattcgcctgatcgacgccggcggcgcttggcgatgccgccaaagggctcactccggctgtcggatgcgccagacggggctttggcttcggccgggccttggttgcgtcgggtgaaatcggatttgtcgcggtcggcgtcgacttgggcggtgacggctgcggcgtctgcttcgcaggtggcgcgaggctcgcctgcttgaactgagcgggcgacttgttggcaacagccggcgatccctggctagagggaccgctgtctggcgacttggcggccgccagcacgtcaagcgacgagcctggcgcagaaacagcctgatgtcgtacgggaaccgcggagtcgcctgaggctttcgggaggagcgtcgtcggatgccgtaggggcgagggtgcgacctggccctgtttaaggtaagtcggcgcgcctgtgccgagcggctgggtcttggacatgcctggcggctggggcggtcgtggcgtctgacctgagcgactcaagacggccgcaggctcaggtatcgggagcggggctgaaggagggtcgggcgaggtggacggccgctctgtgcgcatacgaccctgatgaagcgagccacggagcgcggttagtcggagtgctcagcgcgttgaggcggcggtgaggcggcaacaggacgcacagcgtattgctcgatctcagctcggacccaagtgaagtcctcgcgggatcgctctagatgcgctagcaggtgctgaggcgcgcgaaccatgccgggcgcgagaccgctaggttggcagaagcacggtgagacgcctggctgtcagcatgcgctcctcttcaaagatcgcgggcggcagcgaaactcacagctgccgcgcgtcgacgtgatggcggaggatgaggccagccgtcaggacgtattgctggacgcgcccgggtagggcagcagggaggtagcgcgagatcgtcagcgagccatccactggctcaatgagctaaagcggatccggacgacgaaccgtttgtgcatgctcaagcgccttgagccttcctgcgagccagtccctgcctctgttctttgggaggtccgggctggctgctcctgcagctggcaaggggttgccagctggcgagccggacgatggccgagcctggtccggtgtcgaagacgcattcgccggccggccgagctgcttgaccgaaggctttggctggtccgacatcttatgtatgccgagctgctgacaaccgagcgctgaggctgtgagcgagagcgatggggagtggccgttcgaggagacgcttgtgtcgacgggctagcattggccgaagccggcgacgtcgacgcctcttcctcctatgcacatgggccgggcccttcgcatcaacacccactttgtctctctcaaccatgtcaagcgacgccgccccgacttcgcagacgctcgccccgccaggccacacactccagcacagcagcagcagtgcgacgaccggccgaccgagacgcgccggcgacagcttcgtctatcccgcgcgtcgaccgtcgtcgttggcggcgtcctcgcctccactctcgcctcggacgagcctccatctgcacgagtacccgccgctctcgccgacgacgactaagggtgccgacggcagcgggccgcccaagaagaaaaagaccctcgcagtctttccttcccgtagcctgctgtcgagcgtcgccggcggcgtgtacgtcttgtcttagccccgttttgcccatcatcgggcgtcatccgcccagcccggcgcccggcctcccagaccggctgacgacaccgctccccgatccaggcacggcctacccatctcagaggaccacgagctctcggacaaggaccgccagcggctcgcccgcttccatcgcttcccgctcccggccgacgacgagagccacgctgggctgcgcgtctctgaactgccgcaggcgcagcagatcatcgtccaggacgtgctcgaggtgcgtccgtcgtcccttctgtctttcatcttgtcttgaggctgacagctttcttcggccattgcagctcatcgccgtccggccgacgcgcgacatcctcgagcgaacgttcgcgcgcgattgcgtctatgaggatccaaatctcaggtgcgtccggccgccacctctgctcggacttgactctcgccgaccctctcgcctcgttgttgctgcagatgcgtcggctgggaggaagtcgccgcccaggtgcgccgatccgtctcgcattggtatgctgcgattgcaggctgacccttctcgtctgctaccgctagtggttcctccttgtgagtgcagacaccggagtcgagtttgctgagctcctctgactcttggccctctcgtcttctcgcctgcagcccaaggtcttcccaaaaactcgaactctcgccttcttcctgctcaagccgtcggccgacctgatccgctgggagatggtcgtcgagtacacctgggcgatcggaaccacgcgggtacgtttggcacagcgtaccctggcctgtccagaaggcttacatgtggtccctgaaaccttagatgatccactcgctcgtagagctcacgctcgacgccgacggcaaggtgtcgcacatggtcgacaagtgggacggtcaggagctcaatcataagatgggggtgcgcctcgcctttcgccggccagtctcgactggtcgacgtttactgactactcgcgctcttctggcgctcccgctccagggcatgaagcgtgtgcacgcaaaggtcgcaaaggcgctcgtccgcgtcccttgagatcgaactttccgcccatcgacccagtcttacaagttcgcgggtgagccgtaacaggccgcccctttggttgccggcctcctttccaggacgtccggagcgcgtcgctttggttgacctctgcgctcgcgatccgccgccgctcgcgatctgccgcaatcgcgccatctcctggcctcactcttcgacagcgaggccgaccctgtgaggcgacgtagatcaggacgtcggacgacgtcgctctgcagttggcgccgattagcgcccgtcgcttgaccgtacaccgctcaacctcgagcagcagatcccatgccttttcgccatctcctcctttggtcgacttgtcggcgcgtttcgctggacctacttgccactctcgcgctgcgagtctcgaggaggcgttcggcggtgaatcgggacggcgtgcgcaagaccctttgacgtgcggagaccgacgccgggggtggccaaacacgctccggggatccgtctgtagcgcgtcgggaggaaggctggagggctgggagacggtcaaggacgcctgtcagaggctgcacgctgcgactcgcaagctcgcctttgcaagaggcgcgcctgctcgcccttctcggcaggaggagtgtcttgtgtggcagagtcggtgacgccagccagccagcccgacaacgccgcgcggacaggcgatcgaactcgccgggcgggcgcgagagctcgctgctgccctgttggccttcctcctccctcgtcgaacgcgcatacggcgacggcaacgggaagcagagcgacgaagacgacgacgacgacgacccagcagacacggccaaaccgacacgggacaccccctgcgagcaccgcactcggagacccctctcggcccgttcaagccgctcgcccgggtcgtccctccgacgcgccttcgccagctccggcttcctcatcctccttctcctcctcctcctccttctccgttcggctgggctcgctcgcttcgagccaacacacactcgtgcgagatgcttgccagccagctcgcccaccttccgctgctgccctttctcgagcaccatccgcatccgacgtacgttctcccggaaggctggttcgcgccggccgaggacgagccttcgacctcgagctcaaaggccgccaacgacccgccttcttcggccgcgctccggccaggcaactcggcttcaacctctagagcaagcgctgcgattgcgcccgtttggctcaacgaggcggccaaggcggttgccctctcgccgatcgcctgggccgacgtccggtcggtcgttcggcggtcgcaggtactcgccgccgccgccaacggcaacggcggacaggaacaggttgccaagcggccaccactgctccacctgccggtccagggtgttcggcagcagcagacgtcgagtacggccgtgtccgaggtgtcgtccgacggtggcacgtcgactgctcgtccagggtcgtcaacagacggctcggaaccgtcagcgccgaccgttctcggtgggcgcttcacgaccgccatcatcgacgtgccagcaaccaactaccgggtcctccagctcgtgccgtgcagctcgacaccgtcgccggtcttggcctggacgatggcgagcagctcgggccggcgggagccctcgtcgccgtcgcacagcgaagcctcgccgctcgacctgctcgcccaggcaacgtcgaccttgagcgtctcgtactcaatcggtacatcgtcagccagcctgtcgtctaagagcgagatccctcctcccgcgctatcttccgatacggcctcgccgacgagcgagctcccgccccgaccgatccaggacggtccacggccgagcgcgccttcagccgtcatcctctcggaccgggctccggcaaagccaaccgcagatgaggagtaccgtcgccggtgtgacgagttccggatggccgagatgacggccaactttgactggagcaagactgctctcggcccgcgcgaggattggccgcaatcactcaagaccatcgttagcgtcgtcctcaacacgcacagcgagagctgcctctggtggggacctggtaagtgatctcgtcacttgagtctactctcgaccgctaaggcggacgccgagaaggagctcgagggctccacccccaagccgcgcagagtctcgaaactgattttgacctatcaaaacgcagacttgaacctcatctacaacgactcgtacgccgccatgtcgatgaagaagcatcctagccttttcggtgccccggcggcggtcgggtggtccgagatctgggagggcctcaagtcgacggccatggcctgcatcaacgacgacgtctcggtccagaagcacgacgacctgctgtttatgcagcgcgacggcgatacaacgacatacgaagaggtgtacttcagttggagctggagtggcgtcaaggacgagagcggtcgcaacggtgggatgctaaatcgtgcctgggagacgacgaccaaggtccttgccgagcgccggctgctgacactgcgcgagctcgttcaagcgacgtgtaagtcgactcggttgttctttgcagctcaagagtcgttggctgactgacgactttcgccctagtcgcctgcgactcggtcaaatcctttgcggacgccgtcgtcgcttcgctctccatgaatcaccacgacctgcctttcatggccctttacattgcctcggacaccgctgctgccacgccgagctcaacccggtcgtcgacccagccgctcgacctcgtcggctcgatcggcatcccggaaggccacgcctcggcgccggccgagctctttgtcgctgtcgactcgtcggccagcgcactcggctcggcttcaggccgcgcctcgggtgggtcgatgtcaacgcccgggccctttgccggcgcgttctcgcgcaaagagagccttacgagccatcgctcgtcgtcctcggccagtgggacgcccggccgcgcgagcttcagcaacggtccaggcggcagctcgtcctcggtcggctcgggcatcaccgtcaccgccggagacggctcgtcttgcccttggccggtcgagctcgcactttcgtctggccggccggtacttgttgaggactgcgcaagtctgacgaccggctttgagagccgctcgtggggcgacgtctactcgacggcgctggtcatccccgtcgaagccgaggaggcgtcccacgcgcggtgcctcatcctcattgtcggcctcaacacgcgccggccggttgacgacgaatatctcgcttggctgaagctcatccggctgtcgctttcgagcggtctctcgggcgtcgcaagcctcgaggcgcagaagatgagggccgaggagctcgcacggctcgaccgggccaagactaccttcttctccaacgtctcccacgaactcgtcagtcctcccccgccatcccaccgactgtacatctcgagccactgtgctgactatccagctacttctcacgtccagcgcacgccgctcacactcatctcgggtcccgttaaggacctcttggcaatgcacacgagcgacacacccgagcgtcgcctgcttgccatcaccgagcgcaacgtcgcgcgccttgcgcggcttgtcgacatgctcatggacgtcagccgggtcgaggccggccgtatgcaaggcacgttttcgccccgccaactcggccagttcacggccgacctcgcctcgctcttccggtcggcggtcgagaaggctggcctgacgctgatcgtcgagtgcgacgtcgacgacccgcggcccgtctatgtcgaccccgacctgtgggagaagatctgcttcaacgtgcgtgctgacgtctctgccttttgattctcgacggcactgacgcccacttcctgaaccggcatccgcggcgtccaaagttgatcggcaacgccttcaaatacaccctgaagggcatgatcaagatcttcatccgctacggagcgaaggaggtcgagtttggcgtcgaggtgcgtctggacctcaaactttgcccttcgcgcggcccatcgctgatccgcaatcatcaacgaccggcggcacaggacaccggcgttggcatcccgtctgcagacgtaccaaaggtcgtcgagcgcttccaccgcgtcgcaagcaccggccggtccttcgagggcaccggcgtcggcctcagcctaaccgatgagctcatcaaggtccatggcggcactctctccgtcacctcgcggacaaaggaggagagcaccgatggctcgcacggctcctcgttcgtcgtccgactgcctttggggatggcgcatcttccggccgatcgggtcgaggaagccgcgccgaccacgacgacgagcggcttttcgcgggccgtgcacggctttgtcgaggaggccaagacttggtcagccgacacggcatacgacggacaatcgtcgacccatggcgagacgtcgtcacactctggctttgtatccgagtcgggcaagtcgggcacgtcgggctcgggcgactcgtcgagcaggatcgacccgtcgacccttttctggacgcgagaagacacgattctcatcgtcgacgacaacagcgacatcaggaactacctcatctctacgcttgcaccttattgccgcatcctcgaggcacgggacggccaggaggtgggtagcctgcgactttcctcatgcgcgcgaccgaaggctcatctcagccgatcctcttcgcaggcctatgagattgcactcaaaagaatgccaaacctcatcgtttccgacgtgtgcgtcgccgcacagcccctgagaaagttccaaccgcatctgatgccagcgactttcgtttctgcaggatgatgcccgttctcgacggcttcggcctcatccgcgcgctcaaggcctcccagaccgaggcggcgctcatcccggtcatcatcattacggctcgtgcgtcgctctctcgcccctgctttcagcagactacgactgactctaggtcttgctcgcaggcgccggcgaggacgagaaggtcggaggcttgctcgacggcgccgacgactacttgccaaagcccttctcctcaaaggagctcatcgcccgctgccacctgcagatgcagatgggcaagaaaaggattgacctcgaacggcgctttgctgcccgcacactcgagctccacgtccgggccgtcgaggccgaagagaagcggcgtgaggctgaggagcagcgccggcagcaggaggttagtcgacgccgcgtctcgaaccgaccgtgcagcccttcgttcccgctgctgaccgtcccggtcgcgcgcagctcctcgtcgacgtcacctcgcacgagctccgaaaccccgtctcggcaattctgaacaactcaaaggtgagctagattcaggccttcgtcggatgggctgcgctgactgacggaccgcctctcttaccacagctcgtcggcgacaacctccgtttcatgtgctccgagctcgaggtggcgatcaaggaccctaaggggttccacccgaccaagtctctcctcagcatgatcgaagaggacatcgaggcgatggaggccatctacatgatggtgcgcctgttcgcacctgctcgacactcttatcctgaactgacctcttttgcacctccctcaggcgcaatcacaagagcgaatcgcaaacgacgttctgtcgctcgcgcggatccaactctctaccctcgagtgcgtgctcccgccggccgcttgatgccgagagcgccagctgatgccttgcttctcgggccttttaggatcttccccgtcccgcttgacctcatgagcgagaccaagcgcatctgctccgtctttgcaagcgaatggtgcggccgtgcggccagccatctacgcctctgcctgcctgctaatgctgctctgctgaccctccttctgactttcggcagtcgtctcaaacgcatccatctctcgcttacccacggcccgtcgctccagtcgctgcacggcatgggcttcaagcggatccaggccgactcgggccgcctcgcccagattctcatcaacctgctcagcaacgcgatccgtgagtcccttctccagaagctgctttgcgtcgtatcttcctgacggacaaacggtcgtgtgacgcaggcttcacttcgcctgcaccggtgcgcgagatcaacgtctcgattgaggtccgtaaggatgctccggacgacgacacttgcctgccgccgccctcgacgcctcggtcgctgcccttctccaccgacgctgtcgaggaggagatatatatctttggctccgtcagcgacagcggacccggcctgtcgcaggaagagctcagtcggctgtttcaacgctttcgccagggctcggcgcagacgcacgtcggtgcgtgctctgttccctggtttcctcctctacgcgtctagccgcccataagctgacctccttgcccgctcgccagtcttcggtggcagcggcctcggcctgtacgtttgccgcaagctgctggagctcatggacggcaagatcgaggtcgtctcgccgggcaagactggcagcacgttccgcttctttttccgcgcctcgctcgcacccgcccgggcgcccgacagcctttcgcccggtgcggtacccgacatcttgtcgccgatttctgaggccggccgggccgtcaaggcgctcaacccgacgcttccctccgtctccggcatgcgcgtcctgatcgtcgaaggtgcgtcaaccctcgacccgtgcgcgacatgacctgcctcctgaccgcccttttcccttcgaagacaacgtgatcaaccagcgcgttcttgatcgacagctccgtaaggctggcatcaccgccgacattgcctcggatggcgctgaggccattgaaaagatcgtcaaaaaggcgaccctcggcgcgccttacgtctgcgtcttgcttgacatcaacatgcccgtcatggacggccttacagcgatccgcaaaatccgcgcgctcgaggtcgagggcgacgtgcttcgcgcacggacgcccgtctttgcgctcacgggcaacgcccggcaaggccagattgacggcgcgctcgatgccggcatggacgacgtcagtttgaatcccttcagcctcgctcccctcgcatcgctgactctgtctgcttgccttctcgccctaggtgatcctcaaacgttagccttctgcctcccggtgacagaacccaaccaacgcgaggctgactcttagctcactctccttccgcagcatacaagatcgaccaggtgctcgacaagcttcggagcgtcatccagctcaaccgataatctccggcctcgctcctttcccctcctttgccttcccgccgcaatacccgcacttgttcggcgccgtctcacgctcgctttgctgctcataccttccttatcaaacacacggactcccatgtcgttgtttcagccttgtatcccctaccatcagccgcgcccgtttgctgcctgtatcgttcaacactcgtccctccgctctgccgttcctcgtatgacctgcctcggcctggcgcgcgtccgacctgcctgcgagcctactgccgatcgactagcgtcttggcgggaatggcctgcccactcgcggactgccccgctctccgggctggctccgggcctgtcggtcgttagtagttgtccgcatcgtgacagcgaccgaacaaggagaggacggagcagcagggagaccgagacgcaagtgcagtcggcggccgactctggaggaattcgaactccgccatctctgcgcgccgccgccggcagtcgcatcgcgtcgctcgccgaccacgaacgtgaatcaaagccgacgttctccatcttggcttgacaggagcgaaagctgctactgacggctcacttccgaccttctcacctcgcgccgctgatgacggcccgccaatgctggtggaggcgggagccgaagattgcgcgggcgccgctagctcctccttccggcggagcgggtccggggccctcccatctgcacgacctagcagcgcttggccgtcgtccgttgaggcggtggagccaggaaaagccgcagcctcggcggaatagcttgcagtcgacgcgctagcgacacttcctccggtctgtcgccactgcccgcccgcagctcgagccagagcagtctggggcacgacgccttatcgtgtcttggtaggcgaacgagctggcatgcttggctttggcagaaccagaggatgcagtcgttcgctggaggcgatgcagggctctggcaggtccctcttagctgacgacccagaaagctcacggcttcgttcttcccaacccccttcgaaccctttgcctggcgctgctctcacctttttgtgagtgcctcgccactgcggcctgtctcccgatctggcgccttcgctgacgcggcatacgcgctccaccggctctactaggaacttactcttcacgctcgccccctattcccacctcctttcctcctgcgtcgacgctcatgttctactcgggcctgccagccggccgtctccatgaggccttcatcgaggtgcgctccttccaattgcggcaccatacccacctcgccgactgacccgcctcgtgagtctgcaggcgatggccatgaagcgccgggccttcttcgttaacttcatccagacgccggtcgtcttggtcggtgagttctagtccgtgggagtctgatgtcagaattagcctgacctgggtcgtcctctcgtaacaggcttgctcgccgtcgccttcggcatcgactacctcatcgcgctctgcaagcctttctacctccctccctcggtcgtcacgaccctcgtcgtgtttgccctcctcctcatcctctcggcatgctcgccaaaggaggttgaggatgtcgacggtgttccttcgccgcgacgcaagtttgtcgcgccagtgctggccgtcattgagaagtgtgtcttctccagctgccactgctcatctgtgatcggctactgaccctgcacttaacgcaggccgtgcgacctcatcctcaagcacatggccgtctgctttacgccggctttcattctcatcccggccggccagacgatcgcgcctgctcagatcggctttctgacggcctacttcctcgtgtcattccttgttcgtcaacagtcccctttgcgagtgtccttcgtagttagcgacgtgcttactctttcccgctcacaggtcgtctttggtgtctcgatcggcatccatcgtttggccggccttctgcccttcttccaggagaaggctgtcctgccggacatcgaggcggctcggccacccgtcaggaacgaaaagagcaagaagagccggacgacggtcgccgtcaagtcggctcgtccttcagggacgacaacgccgagtctgcctcactctgtctcccgactctcgttcgccaacacgatcacgcccgagatggagcaggagctcgcagcacgtgactggcctcggcgggagtcggacgcgaccctcatcaacgtcttccctcggaccagctgcaacaaggccgccgccgagatggacgccgaggagggcgacatcggcctgacgcggccttcatcgccggcgccgaccctgttcgccgcaccgatcggcacagaaccgacgctgcccaacgtcgctctcgaggaacgctgcccgactcctttcccatcggccgacgatgaggaggaagctgtccaggaccaggccaagcagcggctcgccgaagagctctcgacctggatggacgtctccctctacgcttcggtcgcccttatcgccctgcccgtcttttacacgacgaaggtctcggtccctctcttcctcgctctcaacatccttgtctacctgctcgtcatccggctcaccccgccggccttgaagaagttcatccacccaatcatttcgacggcttttctcacgttcttcctgctctgggcctttggcgccagtgtcggctggacgctaaagcagagtgagtctcgactcgagcggacggtcgcgggctgcgcgtctcgtgctgacccgctcattgcctttgcagctctcgccgagtactcgacccccgtcgactttatcacggtctggactgcccctcctggcaccgcacttgccccaggtgccggtgatctcctcgtcgacggcctcgacgccggtatcatcgccctcgccctccctctctaccgctttcgggccgacctcaagcgatacgtacgtcgcgcctagctaatgctctcctgcctccgctgagtcccaactgacgagctcgtgtccacagttcttccgcctggtcgttctcatcgttccttcgactgtcctctccctcttcgtctggcctctcggcgcgcgggccttccagctcgacccaaagacagctcgtgagtgtcgccttccctccctcggcgcctccggaaaggtggccaagtctaactctgttgcgcatcatcctgtagtcgccttcgtcggtcgcttttcgtccactccgctcgccgtcgcccaggtctcgcgcatcggaggtgacgagtccatctgcgtcgtcatcgtcgtcgtgaccggtgagcatcattcgcactgtctcgcctccttcctcgccttcgtgctgacaagcttgttctctcaggtatctgcttcgtcatcctgcagccgctcatcctgcgcgcgctgagggtcgccgacgacgacttcctgacgactggcttgctgtcgggtgtgacgagcggcgctatcggagcctcgggcttgctctcggctggcaaggagcgcgctgccgccattgcgtcgtgtacgtcctctgcctgtctctgcaacgcttagaccccaacgctgaccttcctcgactcttgcagtgacctttgcgctcttcggcacggtcatcctcgtcgcggtcggcatcccgcccgtctccatgtacatccagcggctgatgagtttgccctgagcgcgcgctctcctcctatctgtactctttcaacctcattgtagcccctagatgttctacttcgtagatgccatgtctctgtccaacagcgcggccgcttcgtgtgcgacattgtcggctcaaatagaccagctactaactcgcttgctaacggacacggcggcaacgtgtctgcggaaggcgtcgtctaatcgtggccgtccctggccggttgtcggcaggaagcctgaggatagaagtacagaagtttgaggtatgacgatacagggctcggaggtaagcagaagagaaagaccgaggctagaacagggcagccgagttgagcgcgatcgaatgctgcctcgcagccaactctgcgttggacggccggcgctgacctctcgagcctgaagcggccggaggctggccaggccgggtttgggtcgaccgcacgcgtcggaggaagccctggattcgcgtccgcgagggaactgccgcagcaggtgcctgtgaaggggcggcgacaccggagcccgagggcggtgtcgtcagacccgagtcggggagcggcaaggacgtcgacgacgacgagtcgaggagcgagaagtctgcaagtaggcggcagagcaacagtcagtgtttgaataagtgggtagctcgatagtggcggtcaacagacctttgcgacagagcgggcatgacgacgagatctcaagcagccactggtcgatgcagaccgcgtggaactggtgcgagccctcgcagggcaagactcgcaggtcgtcgccgtcctcaaagtcgagaagacagattgggcagagctcctcggtctcctcgagcgcgaggttcggctcgtcgccagtcgcgctgacgagcgaacgggtgtcgggcagtggtgcggccgtcaggccggccgtgctaggccggtagagcgtgcttcctgaaagcaaggcgttgagcacctcgacccgcgccgcaggctcggtcgcatcaagctcctccgagggcggttgcccgtcgtcccgcatgctccgacgatacatcggctcgagcggcagcgactcgacctcgccgccactgaggatcgagcccttgccgctctcgtcggcccgctcagcccgtggccgctgaatgccctcggtcgcgaacggagccgggcgattttcgccgggcacctctacacgcgcggcgccattggcccgatggtcgcgccgtgcaaacttaacgagcgggaacgagtcaacgatcgcccgggcgagaccttgcgtccgcgtctgggccggcaggggttcggcgccgccgttcgagtagcccatccgcgccgcaaaggcttcgtcgatggcgtcctcgtcgtcgtagttgtacggatagccacggccttggcctccactggccgctcgaggcccgtaccggtccgggttgcgggcggcgcgcatcgcgcccatgtagatgacgacggcgacgatgacgatgatgatgccggcgattgcgtaaaggatgatcatggcgagcgacgttcccttgttgccgcctccaccgctccctccgccagcggcaccattcgcggggacgccggccgtcgcggtcggaacaatgttgccgacggtgccggtcgcattcgacatggcgaggacggcacagacgtacgtgctggcctcagggtacgtccgattgaggagcgtcgtcaccgactggtatgatgcgttcaaaagcgacggctggaagtcatagaagtcctttgtcgtatactggaactggctctcaatgaggacagcgtcagagcgcgaccgggtcgtaaagacgttgagcggcttctcgtagtcgtcccgaaactcgggctcgatcatgcagccgaccgaggttatcgagtagagaagcgcggcattggcgccccggtcgcgggcgagcgtgaagacgtcgatgtcgagcgaggagtcggtcacgttgctggtcgagccgaggccggacggcgctcagacgtcagctctctgtcacgcagcagcgtcgaaggaacgctacagaggaacacattcagaggaacacagctggaacgcaccggtcacacgagatgaaggcgatccaaggcgtcgtcgccgtgtcgttcgtccgagcgttgtcctctgagaagtggacgagcgcgccgcggtcgatcccgtcgaccgcataggggtttgggaagaagtcgctcgtattggcgtcggcgatcagctggagcgagagcgttgcatggtaggtgccctggacccagacaaagtcgatcgaggacgactggtcagtcgtgttgagcagcgacgtctcattgacggagcgagctagggagccaaggagagcgcggcgcggcgagcgaggagcgaggatcgtctggtcagcgggcgatgccgaggctcgacaatagggagaattcggcatagctcggagcgtacctgatcgggtcagacgttggagagcaagcacaggtttacaagacgggtggtcaagggcgtgagctcaaggtagcttgcgcgagctcgacgtcgtcgtctcggctgcgggcgcgacgcacctggcacgtaggcttgcacggcgatgaggctaccgagcaagctcctgagcaggaaggccagcatcgaggatgggccgcgaggggatccggctgaaacgggtcgaggagggaagggcgaggagagagggtgctggtcgggcagaatggcgtcgtcgcctacctggccaagagtccagagtcgggcgccgcgcagcagacagcagacgtcgacccaacattgacggccagacgggcagagacggtcgtgacaggcccgcggacggcgaccaacaaacgacgtcctgactgctcttcaggaggagacctctgttgtgcggccccgtttctagtctgggcagcaaaggcagcttccagtcggtcctgatcttcctcggcctgctctactgcggcgcgggtgaagccagctgtcacgatggaccgagctgtagcgagagcggtctcaacatcaccttgcgcagaggtacctcaatcaaagatcgagcaaccggccaaaaagcgagcgagtcgatcagtcagagtatggggatggcagcgcatctgcgaaggccacagtggtcgccggccgctgaccgtctggcaccgaatggcagatttccactcctagtcaacccggcctcgttcaaattcagctctttgacaggcctctgcccctgccatcagctctactgcaaagttgagacgggtcaaggctcgaagtcgaatcaggccggctccggccgttgccatggtgacctagccgggcggccggctgcgctgagaagtcaaggcagcgtcggcccgctcgacgtttaccattcagacacaacacctctcggtcggtccaagagtaccctgtgctcaagaagcacgcactgacaagcctagccgctccccagcctatcatgagcaagtgtatcggccaagagtgcacgcagaacaacgccaggctcgagtgcccaggctgcatcaagtacgagcttccttccgtctgctgagccctcggtggccttcccacccgaccttggcttgcgatgactgattgctcgcccgtgtcccttactagcctcggcatccgaggcagcttcttccacgaccaggcttgcttcaacaagaactgtgcgtcttgattaggatgccgatgctcgccccctgccctagccggcgcacgaccgctgacgaggccttgcgctgccatccctctgcctgctttaggggtgcgtctggtcgctgctccgctcgctcatctgcctggctcgtacctgcttgtaatatcgagtctgacggagatgtctgcccgcatgcctggcagaaaacgcaccggcttgtccacaaggccgcccaggactctgccggcagcgtcgacggcgccctgccctctgcctcggccggaccttccaagctcgtcctcaaggagggccagtttgtcccgaaccccgacttcaattacacgggcccgctccggcccgtctaccccctttcggctaagcgcgaggttccagcccacattccgcggcctgactacgccgaccaccgttcgttcgcctggcccagctgagcccagacgcgcctcgcagaagctgacccgcttctcacctcctgcctggatctctagccgaaggcgagtcggccatcgagaatgaggagaacatgaatgaggcgatgcagatgcgcaagccgtcgcggctgtatgctgccaaggtgcacacgcccgaagagattgccggcatgcgcgaggcctgcaaggcaagtcctacttccggccggcgcagcatgacgagctcgaagctgacgtatcccccatcttcggctctcgcagctcacgcgcaaggtcctcaacctcgccgccgccgcgatcgcgcccggtgtgacgaccgacgagctcgacgcgatcgtccaccaggagacgctcaagcgcgacgcctacccttcgccactcaactatcgcctcttccccaagtcggtctgcacgagcgtcaacgaggtcatctgccacggcatcccggacggccggccgctcgaggagggcgacattgtcaatctcgacatctcgcttttctacaagggcttccacggcgactgcaacgcgacgttcccggtcgggaccgtcgacaaggagtcgctcgacctgatcgagacgacgcgcaaggcgacgcgggacgcgatcgccatctgcaagcctggcctgccgttcgccgagattggcaacgtgatcgagagcgtcgtcaagccaaagggctacggcatcgtcacccgctacaccggccacggcatcaaccagctcgtgcgtcggcctgcgcaaggatcgcggatacccgtcccgttactgaccgaatctccgaccccacattcagttccactgcggtccgaacagtgcgcaccctagcgctcgtagcttgtaatgacagcccgctaataagattgttcgcctccctcttcccagtcctccattatggcaaatcaaaaatgccgggaatcatgcgcgagggcaacatcttcacgattggtgcgcgggagccccttttgatcctgccgagtgcccattctgacccgccctccgcgcccgcctgcagagccgatgatcaacctcggcgcgagcagcctgatacactggaaggacgactggacggcgacgacgcgcgacggcaagcgctcggcccagttcgaggagacaatcctgtgcgtcctgccgtctgagtgctgctcggcgtttctgaccgctgacggtgcacttcccgctcggcagcatcacggccaacggagccgagatcctgaccgaccctccggtctcgaagagcaagcccaagaagagcaagaaaaaggcggagccgtcagcggaggcagacccctgagcagtcgatctagaatggcgcatgcaggcatcgtgtgggatgtgtgagcggagcgaaattgccaaggatcgttacaagcagaaagtggagaaagagagaagatcgacaggaccgggacgggggggtactaagggttggcaaaagacggggcagctcgcggccgcttttgtaaaaggtaaggcgtgtaagggaagatggagggacgtctagatgagatggatagaaagagagaaacgggagaacaatcacgaacgaccgcccgagaagccggcccgcagaccgccctcgagcggctcgccgaagcgtgcctgctccttgacctgccgaggctcgttgttaccgggccggaggtggctgcgattcgagggcgtcgcccctggcctaccgccggcgctcgccgggtagtgcggcgactggatcgaaggcgagtgatgctgccagcggctgttgagcggctggtagggcgagagcgggccggacgagtcgactgacgagaggtagtggtcaagcccaggcagctggctcgtcgaggacgacgccgagggatacggcgaggcttgcaggccgctaaagaactcttggctcggcgtcgcaaacgatccgaacgaaggcaggcgcgggccgccggtgccgacggtcaagccgccgcgaccaccccgaccgccgccgccgatgcgcgagatcggcgtcccgccaaacggcagctcgcgcgaaagatggcgcgatggcgtcgacgagaggtcaaagagggcctcctcctggtcgcgggtgtggctcggcacgcgcggtgtggaggccgtttgccaaggccgggtcgacggaccgggcgagccaccttggaggatgagtggcaggggcggcaggcggtgatggccgccgacagcagcagcactgcgagagtaggatggcgaccggaaatggctaaagcctgtgacagacggcaggagcggtgttgcaaatcgctggagcggcgtcccgaggtggtccggcccaaacatcggcgacggctcgagcacgacggtcgccggcgttcccgggtcgtcgccgttggcgctgtcgccgtcattggagccctcgtcgtcgagttctgggctggccgtcttgggcgtctgcggtgccgcctgcagagggtccgacatctgcggcggcagctggtcgccgtgcggcgcacaacgccagcaaaaccattcgtcgccgaggtcggcctcgttgatgccgagacagggcaggtggaaccagaagaggcagccgttgcactccaccatggcgccctcggcgacagtctcgcggcagatgcacgcaatcgaacccgggccgagctcctctgccgctgcggccgcgattgcgtccgggtgcggagcggtaaaggccgtcacctggtgctcgggcagggccgagcttacttgggtgcggtagatgagcgcctgtcgtgcgtccgatgcgtcgaaggcggccgtcaaggaggggttcgactggctgttcttgagtcgaacttgacggttcgtatgcaaaagggtcgacgatgccttgccaccgccgtgggccgcccatccgtcgtaagcgccgtcctcgtccgagctgacgccagtctcgccctcacgttcgtcctcctcgtcgtcgctggcgctctcgaggtagtgttggaccgtccgcagaacctcacgccgctcgtcggtctgtgagcgccggcggtcggcctgagactggacccaaggctggcaggcgtcgagccaatcgggcacgacgacgctcgaggcggaggtcgaggccgataaggaggtcgagggctcgccgctggcattcgaagtggtccgctcgacaaccggccgcgcgccatactcggccatccgctgcaggctgccctgcgcgacagcgacgcggcccatgccggcaatgcgagcaggaacgagcgcagaaggccggatgtgcgacgacaacgagacggccgactgcgttcggacagcctggggccgtgcattctccttctgcggactgccacagacggcattggcctcgtcgcccgattcgaaggcagccagccgcttgcgcgtccgttccctcgccgcctcgtcgtcggccgccattgacctgctggggcgctgctgcgaggccttccgcgtcgcaggcgccgtgttcgctagccgctcacgggaaggttggagccaggcgaggtcggccgcaagcacctcggtcgtgctgaacgagaccttgccgtcctcggctgccagcagggccggggccgagatggtccgcggaatgctttgcggctgagcagtcaggagagtcgctggccgaggaaccggtgtcctggccgggccggcaggaggcaccgcagacgctgctggggcaggtgctggaggctttgctgcagaacccgctcgtttgcggtccccactgctcttggacgtcgagccggacgacgacgtcggcctgggcgtcgagcgcgtgctgttcgacgtgccttcaccagtggcggcggcaggcagagcagctgctccgccctcggacttgctcgcgagcaggccgcgccggcccggcccgccgttctcgatccaaaagtcggccttcttcgtgtacttgcgcttcggtttcggctgcgggccaacctcgggctcgccggccgaagcggccgctttgctggatgccgacttcagggtggaggcaacggccgaagcgggagcgggtttgactggcgttgccgctggtgtcgggagcgacggccgagcctgagcgctcgaagaggatgaggaggttgacggccgacgctgaagctctaaccgctggaaggcgtgctgcgaggccgggtctgagaaaggtggcgtcggctggtgttggctgctggcagaatacgagcccggcggccagccgcccgacgccgcagggtgctcggacggcacaacggcgtagtacaagctctgatcgaacgtcgcctgtggcggccgggcgaggctcaagaggtggtcctggtgatgcgccggaggggcaggcggcgcaaagtaggcaatcggtgcaggcggcaccggacgttgcttgagcatgctcgacggcgacggtcgacgcttggttggcgactgggagacggttcggacggtcgggtcaacaacggccgatgagccagaagcgacgctggagcgttggccgaggctgcagtgcgagtgaagcggataagaagaggtgaaggtcagtcagcatgtccccatcctacacacagttgcgacgttccgaatctgaaagcggctgcgaagtggacccagagagctctgcagaactgactgggcgtcctcaggctgtggccgtttcctgccgccggccgacttggccgagcctgccgttccacgcttagcactcgtcaagagcgagctgatggtcgactgacggcctccggtgctgctgctgccgctgctgacgggggcgctctcgtcaccgtcgactcgcggcgtgttggccgacgaagtgtgcgttgagcggtgggcgagctccgagagcctgacactgccgagccgcggcgaagctgaggccatgcgctgatgttcgaccgcacgggtatcgaagaaaggaaaagagacgtctgtggaggcaaaattggaagtaggtcaggaggctgccctatacgaaggtcgggagaaggctggtgggacaaggttgaggctccagctcgaaagcggcagtgctcccttgtcggtcaacgcagagaaccgccttgacggccagacgacgtcgaaagagcacggaccaaccctcccagagccgtcgctgcccgcccgctcagccttctgcgagtccagtcgaaagcgacggccgccggagcgagttcttttgcggtcgtcttctcgcagcccatctcgccttgcccgcgcggatcccgcacaaacaaagctcgccgccgataggtcgaggcggtaggaggcaccgactcaaaaagggacgcaccttgtcggtcgggaaagagctgcctgcttcagacctaatcctgtgctgtcggaaaagagggcaaactggagtcgagagggctgctggtcgaccgtcgctgggggttttgatgttgagcgtctcgatcgtctgcccaactgcagcggcgggaggcgcagcgcccgcacctcggccggatgcgccacgagagacacccgcctgccgtggaaaacaagacgacgggccggcagacggcccgggcagacatgctgatactcttctcaaggatggccacgctggaagactacgccttgcaagaagttcaccctgagctcttcaactcctgcttctcgcgtctaggctgaattgacagcgaccggcgttcgacggcggaggagcgacttcactcagccgccggccggcagcaacaccgccagattgactgcttttaaggcccacggccagccccatccccggcccccggcctctgcgccatcctgcagaaggagcctctcagcacgtcgtccgcgacgaatcagaggtcgtccttcaaaggcagggtcctagaaaaggtcatctgtaaggggctgcggcgtaaaggaacgtgcgcgctcactggagtcgaaggacggcgacgccctcgacgtgggccgtctgcgggaagaggtcgaatcctcggagctggcaaatgggaggcggcgaccaggacaatcagctgagctggacgaagtcgcacgactggcaggccatggcaaggacgcacgctctcgagcacgtagcgcttgccgccgacgtcctgtcggaggaggaagccgacgtcgcgcgcttgagtatggacgttgcacgagacgtagacgagcgtctgaggcgcaacggcgacgagctggtcgaggaagccctcgtcgcagcccttgcgcggcggctgtcagagcatcgaaatgaggggggagccgagcgtcagcggctggcaggaggcggaaaggatcgcagaaaggaggacgcacgtcaatgacgaccgccgtcttgtcccagggcaggccggtgactgtcccaaagatctcctcgctcttgccggccttgaactcgcactggtcctcgacgccattgagctttgcgttgcgctcggcaaagtcgatcgacttggggtcaatctcgatcccggtgacgcgctcgaagaaaggcgagagagtgatggcgaaaagacccgagccgcagtaggtgtcgacgaggtgggtcggcagagtctggacgacggccgtcgcgggcggctcaaagatcgcttgccggacgtaatcggtcagcgagggcaggattgagttgttgttctggaagaaggagccggcgggaaagactgagggcggggaggggcgcaggtcagcggaggagacgacaaaagaccagatggaaaggagggcgcaccaaagtgcaggtcgccgacgcgctcgcgaaccgtctcccggtggtcggtgatgcaaacctgtgtgccctcaggcaccgtgttccccggcgggaacgactctgggtgagccgagtcgcgcaggaggagcgaggcgtccttggcatacgaagcagcaatctgcgtgatctttttgcgctcgatcgcgtatcgggcgttgatgatgggtgtcgccagcgggcactcctcaatgtccatcagccgcttcgagatcttctcgtcgaagccgatgaagaactcgtgcgcgccgcccgtagccgcctgctcgccgacgcgggcaaagaagcgcgagccgtcgatgccgcctgagagaccggcaatcagcgacggtgcctcggcgttgtcggctccaccagcgttgtcctcagtcgcgtcgattgtgcctccgaccgtcttcagcgggtcgccgttgaggccagcctcctcgtcgtcgacatctaccgccggcgtcgtcctgcccgaagtgccgagcggggttgacgtcgggctcggcacacgagaagacgctgcatgggccttggcatacgggttcgtgcccttgcgcggggcgagcgggaggccagccttctccataatgtcagtccggatcggcgtcggcagcggacggaagtggggcgtgctgcagggcaggcaaacgggtcagactcgggagcggagcgcatcggatagacgggacgcacattttggtccggtagccggcctgttttgggctcgggatcgtctctccaatctccggaatcaaggaagcgtcaagttctgtacagcaggtctccggatcagccacgcgacgcaacgcatgagcaagtcgcgaagtagagacccactcgagaagtagcggaaggcctttcggaccgtctcgcgcttgagcacgagctgcgtttcgtacgacacatgctggaactgacatccgccgctgtcgggcagaaaggtgataagcggtcagcgttcagttaggtttcttgcatgccaaaggataatcgacgcaccacttgccaaagtacttgcacccaacgccctcaccctcggcgagcctgagcgtcttgttcggctcgacaacctcgagcagctcggccgtagagtgaagccgcgagccagcgtcgatccggacgcgcacgagctcgcctggcaggccgaaggggattgagagcacccagggtcgggagccgccgggcgagtcggcgggagaggaataaagcgcaagggcgttgcctggagatgcgcagtcgggagggcggaagggaggcagtcaagtcagctatagagcaacggggacggctcaaattgacgcgcgggccagagggagacactgaccgccggcagtcatgccgtcgcccgttcggacgacgacgacctggtcgcgctcgcacccggccggcgcctcccagtcgagttgggcagcattggctgcgctgaaagcttcaggaccgaggaagacctgtcaggcgagagcaggtcgacgagagggatccggcagcgcattcaggtcgacggccgagacaggttgagaggcgcaggacgggcgaaagacgagagaaagcaggccgttagtcgcgagctggcgggcggcatgcgagcgtcctccgcttttagcaacgagcacaacggccgcaccttaatctcattcagaacaacctcgtcgaccggcttgcgcttgacgcgccggggtccgttggcagccggcttgatgaccttgcgcgggcccggcggcggcgcgttcctcggcggtgccgccttcttgcccttagcaacagcaggcgtacctgcaccggcagcggcggtaggagcagcaactgatgaggacgcgagggccgcctcctcttggacgtccgagtcgagcttgaccttcttggccgccggcgagccgtgcgacggcgacgagggtggcgtgtgcgcccggatagcggcagcaacagggccggtcgacatgtttcgagcggcgagcgagcgtgcgaagtggggcagcagcagacggcaggtctggacgagcggacagaggcgggcgagggcaagtcggacgacggcgggcatgaatgtccagggagttgattgggtcgctccgtctgccgaggactctgggctgcggccaagcgtgggaaccctgacgttcagctcacgctctgctcccgtcgacaggtcggccttcgcttcctgcggcttgacctcatccctcctctgcctctatccgtccgttctttctcgccagctgtccccccgccaggatgccggcaagcctgacgaagcaagccgagccgttctacacggtggctgctgtacgtctctttccaggcgtgtcctccttgaccctagccgagctcgccttgaccgaccattgcttccccctcccctgctctgcctgtcgcaacagaccgcgtatgacgaatcggccttctgccagcgctacacagacgatggcttcgtctattttgtggactgtgcatagtacgttccccactcgccagggcctctcacgcatcgctgaccctctcgcctgcctccgctgcccttctctcgccctccgccgcctcctccacctctcgcgcgctccacctgcgcgtgcatggccgcgtttgtttgctctttcctccgccgcctgtccccccgttgaacccgccctgcacggccctctctcgccgtcctgcccgtcccgcccacttatcgtctcttcgcactccagtgggatcgcgtacagcactgccacggcagggttctcgtccaaggcggcctcgtattacgacaaggcctcccagacgagctcgagcacagagtacccgatagcgaccggcatcacaggcgacgaggagccgagctcaatctggaacgcgactctcggcttgtgggtgcccgtcctcaacaatctgaccaacgcctcgagctcgagctcggcctcggcctcgatgccgctcatcatcacgaccgagggcggagtctggatcgccggcagctacgccggcgcgagctttgtcgggagcgcctcagtgctgctcggcgctgggagcagctcgagcgcgtcctcggccgcttacacttacaagaagagcagcaagccgaggtgagccctttcgcagccaacctgagctttcttttgcgcgtcgtactgacgaccatgtccctcggatctgcgccccagctcgctgcccatcatcctctcctgcgtctttggggcccttgccctcgggtttggcgccgctctcatcatcctccttcaccggcgacgacgggcccgcaagctcggccttgccaactcgcctcggatgagcatggccggcaacggtcgcgcagcctacgcgactctgccctcgccgacgggcggcccctcaagcagccggccaagcccgtttggcaacgaccggcggatctccctcctcggctcaggcgccttctccatcttcgcgcccgaggaggtcgaccctctgacgggggcaaccgttgccggcagcaacggcagcggcgggctcgagcggaccatgacgacgagcgaaaagcaagcgctcctccgtgaggcttcactcgccgagcgtcgagcggcagcagggacgatcgaggacgacgagctcgccctcgtccgccagaagctcgacacgtgggcgtcgctcgcgcgcgagacgcggcggcccggtcaagcccagcagcggccggtccccctttcggccggcgtcgaggaggggagctcgccatttgccgactccaacgcgatcgtccctggcctccagccgccggcgggcgtccggctgccgctcacgattacgacggccctgccctcgcctcggtcggccccgcgcgcagacggcggcgagtccgtcttctcttactcgcacacgcccctctcgctttatccgggtgcgtcgccggccgacgagccctcatcagacggcagcaatcccgtttggtcgcccgaggacgggacaatggcggcacctctgctcgctccgtctccctccactccggccgacttgccctcggactcagcaacaacgacagtcgcccttggccagcccctcattcccgacaccggccggtccggtgaggaggcggccgccaggcaagaggtcgatgctggccacctggccggcctccggcgctacacgcttcgcgacaacggcttcccggccggacaagacgacgaggtccagccgccggcctaccgctggtagagccagccggctttctgctaacacatactcgacgttctactcctcctcttcacgacacctcaccgatattcttttccatctcgtcttttgcgcgcactttgcaccctctgcactcttctactcccttcggatctgctttttccgcctgttgtgcccccgttgtgttaccatattttgctatccttgtccggctacgtcagcgatcccccgaaggtagaacaggcgcgtctttgcttctgtcaccgggcgtgaagggccggccgaaatgagttggagcggcgcgacgatcctccgcgcagcagcagcgagccgctagctcgtctcgcgcctacaccctcgaaccagcaggccaggacgcgtgtgtctttgccggcctgcctcaaccggaagaactgacgctgaccgactgactcaggctaagctggcctgcctctaaaagagaggtcagaggcctcaacgttgaccttcttccccctcttcacccaccgcacccaccgctctccaccatgctcaccttctctgccgccttcaccctcgccaccgctgccctcggcgccgccgctccctcatctctctcgacagagcgtggccgacctggtgtctctcgccgtgctccctccggcaccgtcaccggcggcagcggcgacagcctcaactgtcggtctctctagcccgctcccactcgcatctcgccgccctgaactgatcggcctcgcttctcgcaggcatcaactatgtctatggcgctccctttgacgtcggtcgcggctcgacgacggccccgctctacgcctaccaccccaaggacaacgagacgacgccgctccacatctcgagcgccaagggtaacaagctcgtccgctacaacgagacgaccgacggcgccatcggcagcttcagcttcgcggtatgcgagggcgaagacggactcgcctacgacggcatccgcaacacggctcggtctgtctggggaaagctccagtggcatgcggtcgacggcgccgtctcgtgcgtgtcagtcgcggcgccgtacgacggccagatccccgttgccggtccctgttcgaccgtcaacaccgttgaggcccagcaggaccagttctggaacctcaatttcgataacgacggcaagccgaacctctacttccgtgcgccggacgagtgcgtgccctcacccgatgcctgctggtgcgagcttcgttgctgactgacttatgatcttgccagctacacctacggccccgacgccggctcgtttgacggccagccgctcgttctcgacgagactgacgtcaaagacctcgctgtcttcacgtttggcgcctaagtgactgtgcttgcttctcgacccaccgctgctttacccgatttactgtagccctcgaccctgctccgcgtgatacccatggcctgcttgtgccgaagaacattctctcaagctactctacaacgaaagaaggggcgatgtggccagtcggcgggtgtaaagctggagacctcactcgggcttctgcaaagcgaggggcggcagggtcgtcagcccaggtttgatttctgcagatcaagagtgtcgcacctcgtgaatcttctcaacctcgcccgccgcgacagcgaccgaaccctcctcgacatcagcgatcgccgtcgactttccgacagagggctcgaccgcggatggcttgctggccactgccttgggcagggcggtcgcgcgccagcctgcctggagctggccgacggcggcgagggtgccgaacaggccggtgaaccaggatgacgtccagagtccgccctctagcgaccagtgcgccgtcagcggaaggtagctggcgcggaacacatcgtttcgaaggtcagtgtcgaatcgatgatatgcgcgctcgtgcacttcgtatgcacctgagctcagtcaatgcccgcaggctgagcgacgtcttcctgtcctcaatctcggccgaggctgcgagacgacatccaggatgacggtcagtgctcggcactatcgactcgaacgggcgaaaaacgacttacagagcgagcccgcttccttccggaacgcgagccgatcacgctggagggcgaggagcgagagggcgacgtaagccgcccaggcgcggcaactccagacggcgaccttgaagatcttggcatggccgacagggtaaactcccttggagctcaagtaccctgaggccggccaggagaagcacggtcagagtcagcacaagccagaggataagagccagatggtcggtcggactgacagatgtgctccatcgggtaataggctagcattgccgcgacctggagcgacgggatgtctgcccgcgagaggagagtgccggtgaggccgccgagtgtcttcgcagcagaagggtcggccgtgcgggccgccctcttggcctggcgctggcgctgaagccggcggtgccaggcgagaatcgggatgatacctgtcggagcacgcctcacagtcagatatctcacgcgtaatcagcgcaagagatgatagattggccaaccgaagaggcggaagaggatgcgcgagtctccgacggccgacgagagggcctgaaggctcagccggagctgctggagcccgcgcggcttgatgggcagcttggcgccggtgggaggcattgccggcagggctggcaggagtagcagagacgcatactggaggagcataagcgccttgctaagggttgggtccagagaggcagcaggttagcgggggaaggccggaggagatgcactcgggaaacgacgcactcggtgccggagagcgtgccgaggtacgctgtcaggcggtagagcgtctcgtccgagagcgagagctttgagctcaggctcgagatgagcttcgaaggggaggccatgatggaggagctgctggggtataaagttgtgggagtgaaggtcgtcggagggagccagctggtcggccggccggcacggcaacgcgtttgaccggaaggtggtgcgcagcactctcgggagaccctccctgcgccgtgcctttcgcaatcccttttctgcacagtcatctataggtagtctagcagggcatactcctcctcgaccgcagcgacaaaggctcgcatctgtcgcgacatggatcgatcagcaggcggcccgcgactggcgcaacttcgacagagagggcacgcaccgcagcctgccgacggaccgccagcttcttcccgaaaattgtctgcaggcgagaatgagaaggtcagcggccacgcagggtacttgccgccgtcgcacgagctcgaaccttcatcgtctgctcgtcaatcttgaagagcttgtcgtcgaaatgcgcgatcgctgtttccggctggcgcgggttgtccttcgacaggtgaagcggccggttgacagaagctgagtacgcacagcagcgcatgatgcctagaagtcggattgatggggtgaatcagggtcacatgtcagctctagcgaggcgagtgtctcgtcggagagactgggcgcaccaaagccgccgatagcgtcgagccgatctgcatcctggacgacggccagctcgcggcagacctcgcgccagccgtcctcccactcgcccttggcccggagcttgcgctccttcgaccacgaggtggcgtcgacgatccggcagacaatcgacgctggatcgagcccgtcgggagcaaacggcgagggaatgacggcgagtgcggcgggggtgttgaagaatggccggagaagcgcgactgtcgtgagcggctcgcccgtggcatacttggctggagggacgggtggcgaggatgtgagagcgatgtcagctgccgggcgcgtgtcgcggcggggtcaagtgtcgcaccatcagtcagatcgtggaagagggccgcgagctcgacgatgagcatgtcgaccgtctctacttcggccttcgcgagtgcgagcgccgtccgtcggacgcggttgactgcgagcgggagggtcggaaggccaacgaatgacaggcaggacgcgacgcgacgcgacgcgcgtcagcccaggcgcaagatgaagcgggaaccacgcctcagcggacgcaccatgatgccagtcatgactagggtcgtaagcggccatgtgctccttgacgagcgactctgccgcaagcaggagctgctcggtcggcgagccggcgctggaggtcatcgcgtcgggccggaaggcaggcagtcgtcggagcgagcggcgggtgctgcgaggagaagcgccggaccgatcgttagcgaccctgggtctgcggcgcggcaaatctttctgcggaagcgagggcgcgactgaaccgagctcacgctgggacagctgttagggcttggggacaggcacagggcgacggtctggcgtgttgaagccgactcgagcattctcgggccgcgccgggtcgcgacggcttccgaagtcgggaaagcgcgaggggtcgacgcagtagtcgccctctgaccaccagcctcctgcatccccatcggcatttgcacacaacacagtcagcaagccagacagacctctgtcccaaagcatgtcggctggcgtcccaggcacagtccggctgatcgggaggcgagagggagctcgggcgagcagccgggtgctcggacccggcgctatcgagccggcctgatctcgtctctccgacccctcggcgccgctcgaccggagagtacaagaaggagaggcagctcgctcgctaccttacctctctcgcatacatccatctcgcccactttcgcatacacctcaccctagccggatgtcgcccatcaaaatccaggatcagccgccaacgcaggagggcctcgctctcgcgacggccgtcaagccggtcaagaacgccgtcagtccctcgaccgctgcctgcctttcacctctcgctgaccgtctacctcttctctgctgtctttctgtcctctgtttagaccgaggccgaggagctcgtcatcaagacggtccgcgtccttgcgtgcgagctgacgcaacaggtgcgatgctcccctctcgcgtgcccgcgcagccgaccctcagctgaccctcttttgaccctcggctcgcagtacaacggcggccaccccggcactgtcatgggtgcggctggcatcggactcgccctctggaagtacgcaatgaacttcaacccggccaacccagactggctcgcccgtgaccgtacgtcgttttccgaggctcggctccctacaatcaacgtcttttcccagtttcgacataggccctgacctctcactcttgaaattacccgacgctgacctgatatcctacccgcaggcttcgtcctctctgccggccacgcttgcctcctccagtacatcttcctccatctctcgggctactcggcctggaccctcgaccagctcaaggcttaccactcgccctcggcactcgctgacggcacgattgctgctggtcacccagaaattgagttccctggtgtcgaggtcactacaggcccgctcggccagggcatcgccaacgccgtcggtctcgcgatcgctggcaagcagatcgcggctcagtatgaccgcgaaggtttcgccgtcgccggcgacgccaaggtcttttgcttcaccggcgacggctgcctgcaggagggcgtcggccaggaggccatctcgctcgccggtcaccttgggcttgacaacctcattctcatctacgacaacaaccgcatcaccgtcgacggcaacattgacacgtgcttcaccgacgacacgagcgcaaagctccgcgctcagaactggcacatcatcgaggtcgacaacggcacgagcgacctccactcggtcgtcgacgcgctcgaggctgcccgcgccgtcaccggcaagcctgtcctcgtcaacatccggaccatcatcggcttcccgtcgaacaagcgtgcgttcagcgctgcctgcctatcagttcgcgcctttgactgaccctgcttgcacctctcttgcagagaactctggacctgctcacggcgccgccctcggccaggacgagctgacgttcgtcaagcagacgctcggcttcgacctcgacaggaagtttcacgtcccggccgaggtctacgagttctttgccgacgtccccaaaaagggcatcgagctcgagcgtgcctggaacgagcgcatggccaagtatgccgaggcctacccagaggcctatgccgagctccagggcaggctgacgggcaacctccccgacggctggcgcgatctcctcccggccaaggccgacctcggcgcggccaagaaggccgaggcgacgcgcaagtcgcacggcgccgtcctctcggccctcgcgcccgtcttcaagaactttgtcgccggctcggccgacctgctcgagtcgacctttgtcaacttcccgggcatgaccgagttccaggacccgacgaccggcctcggcgactacgctggccggcagatccggtatggcatccgcgagtttgcgatggtcgccctcgccaacggcatggccgcctggcacaagggcaccttcatccccgtctgctcgaccttcttcatgttctggctctacgccgcgccggccgcccgcatgtctgctctccagggtctccgcctgatcggcatcgccactcacgactcgatcggcatcggagaggacggcccgacccaccagccgatcgcgctcgcgagcttcttccgcaacctgccgaacttcaactacctgaggccttgcgacgctgaagaggcgagccgccctctctcatacctggctttctggtggatcactaaccctcgccttctcccacattccaggtcgtcggcgcttatgagctcgccctctcgggggagaacgcctcgacgccgtcgctgctctcgctttcgcgccaggccgtcccgctcctgccgggctcgaaccgggccaacgtcgccaagggcgcctacgtcatccacagcaccggcgatgtcgcctcgcccgacctgacgatcatctcgaccggctccgaggtctggcgctgcgtcgaggccgccaagaagctcgccgactcggtcggcagcatcaacgtcgtctcgatgccgtcgcaggagcactttgaccgccagccgcgcgagtaccggcgctcggtcctgccttcgcacaagagtcttgttgtcgccgtcgagccctacgcgagcgatcggtggcccagatacgcgcatgcctcgctctcgatgtacgtctttgttcctcccctggcgttcttgagtccaagctaactttatccgctcttgcaggacgaccttcggccactcggcacccgaggcccagctcttcgaccactttggcttcggcgtcgacggcatcgcctctaaaattggtgcttggttcggcgagaagagcggcgccggctcgctccctggcgtcggcgagtttgacgagttcctgctcaacctgcacccggccgcccactagtgctgtctctcgacgactacttcacctcctcactgtaccaccgttcactttccgctttcctcatgaccttgtatactgtcctgccttctctattctggacttttctcacttgctccgctgggcttcggtgaggaataaagtgcaaggctcatgcagcgcactccaagccattgcatccgccctcctgcagcggtcatgcgagagaccgagctgccctcagagcgccaatgatgtaagtagccgacgaacctctgactctcccgaagctagcagtttctcgatctctgacggcgcgcgttcagagagaccgacagggagcatcaggcgcgcgtactggccgtcctcgagggccgacccgtcggcgttgccgaggcggtgaacctcgcgcgcagcgctcagccagagctccttctggccgggcttcgtcggccggatggcctcgctgatggccgcgaagaggtagggttcgtagaggtcgagcagccaggtgtgggccttaagtccgcccgtgagcggaggccgttcggctccgacgcactcgatcgccttctcggcccaatgagtcgtggcgttggaccacttgtcgaagtccggttggtctgcacgcatgagaacgaggttcatcaaggccagctcctggatgagagagagttggtgggggtcagttttctagctggcacgcgatcaacaaaagatggacatacggcgagggccaggcagaccggcaagggctcgtgccgatagcgcacgtcggagtccgggcggtaggtcgtcacggcctgctcgtagacggccttggtatcgtcgcagaccttggcccgagcgatgacgttggtcgcaggcatgtcgggagcaaagctgttcaggaggtcactgcggcggttgcgctcagtcgcgtcgtcggcgccatcgaccaggcagactcggcatccgcacttgacgccgcgcgaaacgaggccggccgtccgagtctcgtacgaatacttgtggctcgtgtagttgatcgtgactgcgaaaaagggcgagaggcgtcagtggccacagtagcgggaatttagcgtctcggacaagggcgcaccttcttctttcggcgccaggtcacgaagggtgcggacgtagacggcgtcgccagcgtagttgaagacactggaaaaggtttgacaaagaaagaagacgtcagcgatcaagatgggcgacgcgaggatgtggccgatgaccgacacgatcagaacgtacgcaatgggctcgcagctgtggttcagcagactggcagcagagtagacggcgcaaggtcgcgaagcgcgcggctcagactggtcggcattcagcggcagcgacatagcgttcgtctggcagaccagttcgagacgcgaaacgtcgagcgaggtacgcgcaggcgatgcgacactttccttgggcttgaggcgagagagcgataacggacggaaggcgagacaaagtcggcgtggacgtcgtcgccagagtgaaaccgcagcggaggcgtgtccagtcgtagtcgccggtcgtagccttggccgcccgggcgagaacaaactcgaggcctttatccgctcggaagcaggaaggattggcagccagtgcctggcggtaccggcgctcggcgacggcccagagattgagccgacaggcagacgcggcagcgcagcagtagacctggggtcgcagctcgtccacctgctgaccggtgagccgctcgaacgtggtggccgcgcattcggcatcctggaacgccgtacgaagaagtccaggcttggtgcggacgactcttcgctggacgtacagctcgacgatgtcgggccgatacttgagcgcgtcagtgagaagctgctcggcccgagcgaaatggcctttgtcctgagcctccagagctgcggtcttgcactgtatggcggaagaaggaaatttctgcaggggaagtcgagaggcggtgaagtctttgaggtcggaatagtagtctgcggggggtcaatggacgcctggcaggtcgcgttcgttgacgaaacagatgtcggtcggcgagtcaatgatgatctgaatagtgacttggtcagcgctggaaaggcagccgaaaggtgcggctttgcaggacgtaccattggaagcaagccctggttgagaatgacaaacggctcgcggagcatgatcaccttgccgagaatcatctcggtcagctcgccgatgctcgaagccagcgtgaacggaggaccatcaatctgggtgaggatgcgcgtgccgtcggagtcggtactgcgggcagcgagtctcaggtcagcggaagaggtcacgtctgagagtcagtcaactgcgcacacaacgaagacgatcgggccggaagcgcgagtcggcggttgatcgacccgcaggaggacgtacttgccctgcagagagacacacgggacgtcagtcccggctccagccagcgaagagaagcccaaggtcagacgaacgaggtgccgctttggcatctgcaggctcttcatttggacgcgcttgagttcggcgagcgaagccgtcgagaagtgcttgccagggccggcgcagaaccaggagtttccgcggccaagcccctctcgccatttgaggctgacccaggtcaccgtggctacggcttttccgttgtcgggaactgagcggtagacaggggtcgtgagacgcgcaggttagcacaagggccctcgaccgagcgctcgagcctcaaagaggctcagaagacgcacaggatctaccgcagcggggacagttcaaggatagctttgagtcagctcttctcgagctcatcgcctcggcggaggacgcacgagacccggacgggagctttagctaagcttctctgctggaggaaggcctgccgcgcttggacggcgttgcggccggcaaggccattgacgtggccctcgattttgcgcaccaggcgttcccagtgggttttgtccgtcggcatggccgccagatctgaaagacggacgagggacgcgaagagctgggctggtggtggtttgagcgagaggagcgagctcctgacaccgcgccgcctcacctcgcgcgccgcgcgctacgcagcctcgaacaaagggagcaaagaaaggggtctcgcggtcgacgtcgtcgcttgcctgtcaaagctcgtcattcgcctggttcaggcaaagggcccagctgggacgagcaagttggtagaggtcggccgcgtgaatcctgctgcatctttgctatacggatcgagcgccgaccggccccttttgcccagctgccgattctgaaacgccatctggcgcgcctcgctggcacagtcgtcgagttggccgccctagtaagagacctgcagccagtaccgccttggaggccagcgctctgggcgagcgccgtcaactacagggcagtcatgaagaggcgggaaagcaagcgcagccgcctgggaccggcgcgaggaggagaagagagagtcggcggaaggaatcgtgtcgaggaggcgtgcgcaggttgaacatgcgagggtaagatgcaaggggaaagcggaggcaagtgcggaaggcgatggagcctcaggttgagcgaggcaaagggtagtagggttgcgagatctctagttcttggtcgtcgagccgacgtgacctacgacgaggcggagcgtgagcggcagtcagcgtcggcctggcagaatatttgtggctgaagtggaaagagagtcacccatcggctggccaaccttgacgagctcgccctccttgatgtcgaattggaagtttcgcggcgcctcgaagaccatgacgatggtgctgccgagcttgaagccgcccatctcgtcgccggcgttgagcggctggcccttgaggagggctgacgccttcgagtagccggcctcgatgtaggtgccggccgggtgcgagcggattcggttgttggtacggagggcctgtttgacaggtgcagcttgggtcagcgaaggacccaacgtgctggtcagactgctcgacgacccaccttgtcaaaattaatgatgatggagccgacgttggttgcgccgaccgggaccatcgagaagaagccgtgcttccagcggccgagcactgagtgaaaggcagggtcagtcagcaaggagcatagcgctggtgacaagtgggcacaggaagggacgcacgggcaacacgctcgttgagcacgaagaggcccgacagccggcgagcgatgtagggcgagaccgaaaacagctcgccggcaaagtgccgacgcttctcgacaacccatgccgcgggcgagtggaagcggtggtagtcgcccggagcgaggtagatgacggcaaagaagagggcgttgccctcgcggagcttcgtgaccgagctccgcgggccagtcgtcgcctcggcgccgagcgagagcgcgactgaggcgtcatggacgaggttgtcggtgaccgacgcctgcgggaccgaggcgtcgcccgtgctcgagctgctcgacgagttggagcggaggcttgcaacgtcgccgtcggcggcgtcaccatccgagccgaccttgcgctgcgaagcaccgagcagctcgtcaagcgtgtagtcgatgtcgttgatgttggcaaagtcatggtctgaaggagacggcggtcgggtcgtcaatcagcgagcgccctgtaagggtaaacttcaagtggggcgacccgcgagcacgcaccgtcgaaccgcttgttcgtctcaaactcgacgtcctcagcggcgggcgtgccagggctgtcggtcttgccgagcagggcgtcgagtgagtagctcatgcccttgacctgctcgaccttggcgcccgagatgcggccaaagtggagcaccttgccgtcggcgggcgagacctggcaggaaggagacgcatgacaggtcagagagctgtcgccgaatgaacaagaggaggcaaggaacgcacgagcggggcgtcggcgatgggccgcgctccgggccggagcgtgcggtagaagaagtcgcccaagctggcgtacttcttgaggtcgggctcctcaagctcatcaaggttgcagccgaaagcgtacgagtagagcttgaagccgggctcgcgggcccagacgggcagctgcggcgagcgaagatgcgcatgtcaggcgagtcggcttaaaaaaggggaggatcgacgcagcgggcgtgcgatgctccggccgcaggagagctggacggacctcgaacgagttgaggtagccccagaggcgcgagagcgaccggagcgggagggcacccatcacgtgcacctaggaggaagagcagagagaaaaagagttaggctaggagagcttgtgagggactgggcgcccgccaaggagccatcggcgcgaccggccgcccaccaccacgagacgcacctgccagggcccacggacgcggacaatcatctcgtcgccgtcctcggccatgccaatgtcggcccggtcgccctcgaaccgcttctgcaccgtcttgacgccgaggtagaaggcgccgaggccgatcgggatcggggcccacttggtcggtgtcttccaagcggcatgcaggcgagctaaggaggagcgcgcgcgcgtgagcagagaggaagggtcagcacgtccagtcgacgagacgagtgctcacctggcaggcaggacaaagcgcctgccagagggcagcatgctcggagcgaacagcagcagcgaggaacgaaggcgaggacgcacagccgaaggccctccgcttcctttttccgccgtcggacgggccggcgccgccggtgagcggctccttctcgtcgcgcttggccgagagcgagctccggaagccgcggcggaagcccaggctcggccggtggggcaggtaggccctatacgacgcccgggcggacgacgatgcgagctgaggcggggtcggcatggtgggagaggtcgtttgggatggccgtcgcgggggctcgaccggccggcgcgaggacgatccaggcggcggcggcagcggcggcggcgcagacgagccggcgcgtcgctcgtcgaccgagagcagcccctcaatctcgccctcgtcgccctcggcaaaggacatgggagcaggcgtctatggtcgggtgtgaaggtagtggtaaggtcgaaaggaaaggagggaggggcacacgaggggcaggtcggcgttcggaagcgacatctcttccgacgcgagcagcagcgcccttgtttgctgcgccgctcagacggacccaccgccgacgaaagcgtgtgtctaagcgcgagtgcgtctgctcaggccgccagtcacgcgagacctaaaggacagcagaggtcgccgtggatctcgaaaggatcgaagtgactcaagcatgctgataaggcctcatgctcgagcgcgcgcgtaaaggtgaccgacaccccccctctcctcccgacgccgccctcaaaggccgtctcgtgccctcagggcactgacgagcgctcctgccgtcggcttgggcgagacgagccagtcgagtgcaccatcttcttgcgccgtctgctcgacccaagcctgctcggtcgtcggcccgatcagcgcgtagcgccagcggtcgagcccttctggccgagctcgcaggacaggcaggagcagaggcagggccgagggtgagaagatggcgatccatggcctgcgccggtcgtcggtcggcgtcggcggcagggcagagagcagcgcgttgagcgcctcgccgaagcctgcggtcggcgtcgtcgcgtagacctgaagcggctcgagcggaagcggcggcgagcgggccgcgagcgtctcctcgaggaccgatgagttcttgtcgcccgtcaagtagagcaacggcaggctatcatctccgccatcgtcgtctgcaaagtggtcgaggatgacttgcgcgagggcgggcgtgttgccggccgtgtcggtcccgatgatggcggacctagctgggcagaagcgttgcggaatcatatcggacagcgcaagtagcccggtcgtcgtcgaagggccgattgagaaaaagggaacttcagaccaaggctggcctgcggggagggacacagcggacaacgtcagcaccctacgccgcatcgagcgttggatgctcgcagtcgcaccgtcatcgttgccgagctgatctacctccacggctcgtcctttgcccttgccgaccgcaaccgagtcgtccgctgcgccgagtcgctcgcccgctcgtctccaagcctcgacgctgcgcccgctgctgacgacgaccccgcgccagagccggcttcccgcccggaggacgcgctcgagctcgccgtcgtcgacgagcatcgtctcgagcacctcgaggaaagccgggccgtaggatggcgcgcgcgaggtcgatgccggctggctgaggaggtgggcgtacgggtctggagtcgaggtcgagcagctccgcgccgacgttttgaggaggacgaccgggatgggcagcatgacaagctgggggtcatcaaggagcggctctgtcagctcaatgaccagcatcaggcgcggctgagagcaggcgatgcaccggggcagtgacggcgggttgatcgaggtggacgtcgggagctcgctgtcgaccgcgctcgaccaggcaagttatgcccttctcatcagtccgtcgcagcatctcatcatcggcgtgccgccgctcgtcaagcagtcggacatccttcccaggttaaacgccgacctgctctctcgcctcgcagctggaaaatggctctcaaatgaagtgactcgagcgagatcaagagccgtggtcgagctagtcggaggagcggccggccgtcccctcgctgcccgtcgccttgcctcatcggccagtcgtcacagctggctagtccacgtcccttaaagctgtcctgggctcacttctagtgagctcgcccagtctgaacgagccagggcgtcatcctgcctgtccctccctgctgcgctcctcagcgcgcgcggcgacgtcggccggtcacgcgctactcgagctgtgctcttgcgctcagccacactgccctcttttcgccgcgcctacaaaaggcttgctgccggccgcctcctacatcttgctccccatcctctctggccttttggcttagatcatgtgtagtatctgttcttataaagttaaaactttatagccctcccatcgggagggctcttgttttactctctttttgccctcccgtgcttcccgctcctctgcttgcacgagcggggcacaagatgacctcggcactgcactatcgccttgcgtcgtcagggacccccctcctcttccatgctctccttgctctgttctcccttcattgaagggaccacggcctggacacggatttgctcttctctgcttgcatctgcccctttacgcctggcctttccttttgctttgccttgggccgtcgttattcacccattcccgcgtatgcttgtcatataatgaacacccccgttccctacggaccccacgctcgcggcccgaagatgctactgatttgagacggcgcatgctatcgaatctcgacctggaagttggcgcggcagcgctcgccaatctgcgagtgcatgctgacaacctcctcgctcgtcagcgtgcgctccatcgagcggtacgtgatccggtacgtcagcgaccggcggccggtcttggggtgcgtgaagccgtcgagctgggggcggggaagcaagggttagcgagactggctaccgtgcatggtcgcggccagcgtaccttctcgacaagctcggccttgtcgccggcgacgtcgcggacgaggtcgcagtagtcgttctcctcccaggcctgctgcggctcggccggcagccagaagctcatgtccatcttgaccgccgggtaagccgaccagggcttgtacgtcgtgatgcccttgacggccgagaattgggagcggaagcgctcgtcggtcgtccagaagaggcggatgtccgggatcgagaaaaggatcatcgagagccgctcgaggccgaggccaaacgcccagccctgcttctcggggatgcctgcagaggtagaagggccgttaaagggagggaagagcgtttaagggcgaacagagacacgcaccagaccgcttgagcaggtcctgcttgacgacgccgcagccgaggatctcgagccattcgtcgccccacagaacttcgacctcatagctcggcgcagtccaagggaaagtggcgttgatccagcggacctggagcggctcgcccgcctggtcggtgtgcgttcggaagagggtgaggatgagcgagttgagcgagagcttaaggttgtcggtaatgagccggagcgtctcggcgtcgtgctcgggctgggccggattctcggccgccagcggctcggtcgggtcggtcacgagcaacggcgaagccgattgagcgatctgatcgcggagagcgtcgttgagggccggtagcttgctgatgtcggccggcgaccagaccgaggcaccctccatctggtggaagaccgggtagtgcgaccggtcgacctcatcccgccgatagacgtcgccgctgataaggtactgctcgagcccgctccggaaggcctcgagctcgtgcgccgacgtgtgcgtccggaggaccgtctcgcggtcgaggtaatacgagtcgcccttaacccgggccgggtgctcggacgggaagccgagctcgtcaaagttctgccggaccgagacgacggccgagggcggcctgacgggcgtgaacgtcgagaagtgcgattcgatcaaggtccggatgatgccgatcggatgtgacggatcgagatggagagcgagcggcagcttcgacaggatctgcggggtcacgttggtgaactcgtccggctggtacgacttgccctcgacgatgagcggcggctgggatgctgaggagggtgtggagcaaagtcagctcgtggccgagtctagacgagctgagcaagggcaggccgacctggaggagaggccgagctgtaggcccggaggcagccgaaggtcgagccgaacgagcgagcggccgaccgcgcgaacgacgagctggcgaggcaggatacggcggccatggctgagactcggccggtgcactggctggccggttggaagactatgtacgaggctaagagagaggcctaagaggatgcgaggcggtggaggtcgacggggctgatgctggttaaagagcgagtcggggtcgacgcgagtcgccggcgaggccgtagtagtcgcggcgcggcggagggacaagtctttcgaggatgagcccgctgcacttgctcgctcaagcacacgaaaggtcaagcgggcatggggtcatcaagatcgtgaaggagactgaggtctagaagggagtgatgagaaagggaacagagagtagggcggaagctcaaagctgagcggggcggtcgacagagtgcatgtacactgccatgtccagaaggcctggagaggtggaagggaggatcatgtcagcagaggcgcctgggaaaggggcaaggaacgatagaacatacggagggcgtagccggcctcattgtcgtagaaggcgaggatctttgcaacccgcttgccgaggaccgagcacgtcttggcgtcgacgacggccgaggcgcgcgtgccgaggtaatcgctcgagacgagctcgaggtcagagacttcgaggacgtgctggctgacgacgtcgtcggacggccggcggaagggcgcgagcagctcctcgaccgactcaacgtctgagctcaaggtgacggtcaggtcgacgagcgagacgttggtgaccgggacgcggaccgagatgcctacaacatagacggcggtcagcgccggctcggcagatggccgaagcggacaagaaggggcgcacctgagaacttgccagcgagattcggcaaaacgagcttgatcgccttggctgcgcccgtgctcgttgggatgatgttgccctgaacaccccggcctgagcgccagtcctttgaagagaagccgtctaaaatatgctgcgaggcggtgcttgcgtggatcgtcgtcatggtggcactgcgagggagcaaggacgcgcaaggtcaggctcgaattgagatgctggagacaggcagacaaagggcgcacctctcgatgccgaactcgcggtcgaggacggcggcgatcggagcgaggcagttggtcgtgcaagaagcgttcgagacgacctccatggccgacgtgctgcggtaatcagcgtgatttacgccaaagacaaagctggaggaaaaatggtaggtcagcgaggagtcggtgcgacggccgcaacatggacgtacgtctttgcgtccttgctcggggctgagatgatgacacgcttggcgccgccggcgtcgatgtgggcgcgagcctgctcgatcgtcgtcatcttgccggtcgactcgatcacgtactcggccccggtcgacgcccagtcgagcgcggtcgggtcgcgggacgagaagaggtggatgcgccggtcgccgaggacgagggcaacgccgtcgtccgatatcttgagctcagagtagagccggccgtgggtcgtgtcaaagcggatcgcatgcagcaagtgtgcgatcgagggggcggtgtgattgatggcgacgacgagcaggtcggtcctggcgagcgaggcacggaaggcagctcggcctgtagagcaaggaaggcagaagggaggtcggaggaatggaggtcagtcaagggggctgctgcgggccacgcctcaccgccctgtccctcgtcctccgacaagacaggtgagcgagcaaagactgaccgatgcggccgaagccgttgatgccgaccagggtcgggctcggtgtcgtcgaggtcgcgatgggcatgttggcagactggaggtgcgacagggtgggcgagggcggagggaggctgggctcgagggaagggcaggcgagggcggcttggtctgtgggtcgaagagacggcccgtcccgacttcgcactaggcctttatagcagccctgacccggaggtggaccgcgagggccgctcgaagaggctgagcctcgtcgacgagctgcgctgcaggctgctggggtaagggccgatggtcggggcgacgtttcgcggcaatggtcgggcgcaagaccgacgggcccgctcgaccgaactgtcggtcgacgacgaccgacagcagcaccgctggcagtgcccaaccgaccgccgcctcctagaccaatgtggctcttgaagagagcgacgggccgggtccggaagcggggtcgagctggggtactgaccgaccgacagcacgacgcgagcggacgttggccgtgccgccggtcgacgactgcacacacctcccggcccagcccggctcccacacctcgtcgacccgctccggcagccttcactcgcgcgatgccggacaggagttggataggataggatcgcaaagcaacagatatcctactagcgccgacgctggccgtcctcctcgtcgtcggcatcccagtctcgacccgagccgcgctcctcagccggtgccgccgccggtgccgccgaagccgccggtgcaggtgccgccgccgcactcatcgacggcggcgcattgaaccaagagatggatgtcggtatcgacaggtcggtgatgttcgtcccgcgagcgagggcctgagcgagcggtcagggagtggcagcaggcgtcagcacaagagagccggaccgtcggcggaagcggggctgacccgcaccttctcggccagcggccgcgacttgaaggtgacgatgatccggttggccaagctctcgacctttgagctgtcgacgcctccgattgtctgcgaccgacatacacaagcgggcgttaggagccttgcttgcagaacaggtaggcattcgcgacgcacctcgtaccaccgctcgacggcgccaaccgcctcgctgtcgtcggtcaagccctcgccggcgatggcaatgctcttcgtccggaagtcaagcgtcatacttttgcctcccgaggccggcgagtaaggcgcatggaagccgcctcggaaagcaccacgcacagctcctcggccgcgaccgcgaccccgtccgcgcggtgcggggctatagggcgtcgacgggcttggtgacgaaggagcgttcgggtcgacgccgatgagcgcggcctgcgaggcgaagcgagggaatggtcagcaatggaaggcggagatcaatgcagcgacgaaggggcgcacctcggccttgagcacctcaagcttgcgctggagcatctcggtctgcgagagctcggccaccggctcggccgctgccacaccctcgacgccgtccatcgagccagcctcagcggttgacggtgcgtcggcgaccagctggctgaaggtcgccgtccggttgccagcggcgttcgtcgccgtcgccgtcgacggcttggcgagggcgagcgagcccgtgccggccttcatctcgtccgacagcttgctaaattgggccatcagcttggccttctcctcggccggcaggtctgggcccgacagccgggccatcaggaccttctgctgagcgatctgcgactcgaggaggcgttgcttggcaagcatctcggccttgctcaggacgggagctgccggtgcggcagagtcgtcggccatggacgcgtctttgctgctgccatcggaggcggcgagcgcggctttgcccttctcgagcgcttcgaggcccttggcgccctggccctccatcggccggtgccagagcaccttgacaaagcggctgccgaagacggcatcttcgctcttccaggccttgtaggcctcctcgttagaagcaaacgagaccagggcccgcgccgagggcacgtcgagcgcgacgctcgtgaccgtgccaaactgggaaaagtagtcggtgacggccggcacgccgagcgaagccggcgggatctgcatgatgacgagcgtcttgccgttccggttctttggcggctgcgtcgaggtgtcggtcgggaagacgccgctgccgcgctgatagccgccgcgccctggcccgcccatgctagcgtgcgaccgtgggccgcccatgccagcgcccattatcatcggcgggccgttcggcggcatgcccggtggaggacgaaagccaccctgctgctgccagcctagcggcggcatcccctggccattgaacggcgggccgccatggccgtttctagggggaccgtcgccaggccgacctccgttcggcggcggcgcgaagccaggtccaccaaacggcggaccgcccatgccgccgcccggcatcatcggaaagccgcccaagcccatgcctccaaactgcatcggcccacggccttgccagatgctgccgtagtcaacgcggtcgcccatgccgttcatggcgagctgctgcgcgacctcgaccggcggcgggatgtagccccggtagcctgggttgtggtcaaatgtgcaggccgggcccttgcggcagaagccgcgctggtgatactcgtagcaaggcttcgggccgcgcgggtcggccggccccccgccgccggcactgaacgaggacgacgacgaggggcctgcgggaggaccgccgtcagtcgttggcaaagcaggtagtggatgcgtgagtggctggccttgtgacctcggccctggctgtggcgacctcagtcggggtgccttgggtggcgagcgagctgcactaggcgagcgcgagcgcttgcgcgtcaagctctcgccggccggcatgtacgactttgagcgaagagcttcaaagagcgcctggacaaaagcatcggtatctgagcagcgagcacaggggcgtcagcagtgctccggctgggggcaagggtggaagaaggaggcgcactgtggtccaggaagtcccgcagctgtgtcttgacctcgtcctcgacctcggcatccgacgcctcggccgccttgagaagcgcgaccgtgtagtcggacaggagcgacgagtcggcgtccgagatgggcgcgagctggtcgacgaggtacgtcttgagcggcccgagcgcctcggccggcagcgggaagagggacggcgggctggccatgacgggcgggcgagcgagcggaggcgagcggcgacgcgcgcgagaggtcagaagcgccggtacgactctctttgcgctgctttaagcttgacgggctgctgtcctgcaagcaggtggatcggtagtccagctaagtggtgctgtctggcagaaagactgaagagaagaatggcctgggtgaagggagtctgcgagattgtggccgttcgagtgcaaccttctcaaaactgggcctgcttgcttcagcccacccctccgaccgtcacttccaaactccccttacctcgctcaatcatgcccgctcctgcttcgctcatcgtccttggcctcggcggcgtctcgtcttcgttcctccagatccacgccaagacggccgcgctccagtctaagttcctcatctcggccctcgccaactcgcgcttctcgctcctcgcgcctaagcagatcccggccgtcgacgtctcggcctgggtgacggctcacccggaccgcaagccgctcgacgtcctctcgctcctcgaggccgtccaggccgactcgcgcggacctgtcattgtcgtcgacaactcgtcctcgcccgacctcgccgccctctacccggcgatcctcaagtcgggcgcgtccgtctgcacgcccaacaagaagtcgacctcgagcagcctcaagctctacgaggagatcctcgccgccgccgagggcgacaaggctggcctctactacggcgagtcgaccgtcggtgccggcctgcccatccttagcacgctcaaggagctcatcgcgaccggtgatgagatcctcaaggtcgagggcgtcctctcgggcacccgtcagtccccgcctgcacggtcgtccgtgctcaaagcactcgacctgaccctctctctctctcttgccgccttcagtgtcgtatatcttcaacaactactcacccgctgtcccgtcgtcggagccgccgtcgttctcctccattattcacgttgccaaggacctcggctacaccgagcctgacccacgcgacgacctctcgggcgtcgacgtcgcccggaagctcaccattctctcgcgtctcgtgccctcgctcgcgtcgtcgctctctgaggggtgcgtctcgggctcgggatgcatgatcgctgcttgcgcgacaactgttgacctggcgccgatgccctcgcctctttcgcagctacgcctcgatcccgacccagtcgctcgtcccgcccgcgctcgaggacgccaaaacgatggaggagtacatgaagcggctcgctgagggcgacggctactttgccgaccttcgcgcggcggccgagaaggagggcaaggtcctccgttacgtcggcgtcatcgaccccaagaccaagactgtcaagtgtagcctcgagaagtgcgtccgagtagcctgctatctcaatccttgattggcccgtccgctgagccgccggacgatccaggtacgacgcctcgcacccgttcgcgacctcgctttcgggctcggacaacatcatctcgttcacgacgacgcgctacccggagcggccgctcatcatccagggcgccggcgccggcggcgacgttaccgccatgggcgtctggggcgactgcctccgcgtctgggagcgccgggcctaggtcgagcgtctcaagtgtgcaaaggatgaaagttaattaaggtctggcggccgtgcgtaccgttcaaacagggctacttgctctgcccttctgcaacggtccaggacgggcgcctttgaaaggcgagcgtcagcagcgaccggcgacagacgtttcaggtcctgccgcggctcacttctctctgatggaaggatgggcccttgatgggatgatggacgagcacagacagagagaggtgtacgaatgcaggcccctagagctcagtctcgggagcgcatcaaagacgccagccctgccagacgggcagctttgttgtcgtcaggcgccccgtatatttccctcgtacacctgtgcgtcattgtcacgagtcgactctctgtcttgcacggccgccagcctacgcgactcggccccacccgcggtccagtgacactcgcgccagcagggacccgaaggcgactgctttgcccaatctacatcacccttgccttctgctcctcaagccgacctttgagcaggagtcatcttcatcctgccccgggccgttccgctttctctcagagctcccagctcgggacggccgagctcgacttccacgagagccaaccctcggtggtggccgtgcacttgcgggcgacgatctcgcggattcgctcgctgacgccgaaccggtggacattgaagtgggcgcggagcatctcctcgttcagccggaagtcgccgctcgtcttgtgctcgccgtcgacgagcgagcggatctcgccctcggagggcaggccaaacgcccggtaggcgtacttgtcgaagccgtggacgggcggaaggagttcgagcgcgggcgttgcaggccgcagcggcgtctcgtcagccgggtagaactgggcggcgagcttagtcggcgacgaggcaggttgggcaaagtcggctggaagcttgtcaacgagcttgcgaatgacgccggacgggaagtcgggcgaggcgttgtgctgcgtcgaggggcgtgcaagcgggtcagggtagtgcttaaagcggcgtcgtggggcggctcgcaaggcagacgagagcacgtacaacaaactgctccacggcgcggtactcgcgctcgaaggcccgcttgagcgcggcgttcggtggcaactcctccttagactccttctgcttagcggcgatgtccttgccgtccttggccgcgcgacgcatgccgagcagcgtcacctccattgagatctggctacgcgaggccatcgtcacgagcgtctccttggcccacgccgagaccttgcgggcgtcggccgaagcgcccttggtggccgagccggagaggagcatcttcttaagcgagtcgctgatcgcagccaccgtgttcttgctgaaggcctcgtcgagtgcctcgcggacggcgccagcgaaacgcgtcggcgagttgggctcggccgcgtcccactcgacgggcgcgaggccctggcgcgtgcgctcctcggccgactcgagccggggcgcctgggcctcgtagtcctcgatgatcgagagcacgccttggacgccgccgtgcttgtctgggtcgcccattagctcgagccgctcgtggagctcgtcgagcaggtgcgagggcacgtagtgggtcgcgaggccgagctcgaggacggcccgaccgacgaccgtgttgcccgtcagggcaaggtaggtgccgacctcgccatcgagctggttcaggtagtaggtcgcgccgacatcgggcgtgtagccaatgatcgtctcgggcatggctgcggcggcgggcaacgggcaggcgtgtcagctgcggcggccgcgcacgacgagcagcccgagggccaggtcggacgcaccaaactgcgtcttttcggtcgcgatccgaatgaggccgccaaagctgaggccagcgccgccgcccatcgtcacgccgttcatcatggcgacgtagatctttgagccgtcccaggcgtggtcgccgacagagtagttcgcgagcttccagtcgagctcaaactcgcgcttgaagaagtccatcgcctcgggccgggtcgccgggttggccgagagctcggcaatatctgcagcgaggtaagcagtcgggatcagcgaatggccgaggcaggaagagggcagctgatgcagggagccaaggaccaggaaggacggacgcttgatgtcgccgccggcgcagaatgcgcgctcgccagcgccccggccgacgaggatctttgagagcctcgaggccgaccagttgtcgatcgagacgtgcaagaggtcaaccatctcggggttgagcgcattgaccttctttggccggttgaggatgaacgtccgggtcgcgccgcgggcgttggtgaggacgaccgagccggagccgtcgttctgagggaggatcgtcgagggagaagaagacgcagggcagaggagcgagaagagtcagctcaccgcacgtcgagcagcagctacgaggtcagaagggacaaagacgaaccgtgggctccttggcagcggcggctgccgggctggaggtcgacatgtgccgggcgatggccgacatgcgcctcgtggccgtcgcggaggggaggtcagacagcgtggcggcggaggtcgaggagctgctgctgctgctggcaaaggcggcgcgcgaggaggaggaggagctcgttggcagcaggcgggggaaggccatcgtctgtctgatgggtgtctggtgcaaggcgggctaaagaggggcgtgggaggaggacggaggtcggagggagagcgagaccgcgcgggcgcaagagcaaggtcacttggcaagggcctccagccggcaagcccgccgtcaacgcccggcaatggcttcgccgagaccactcggtccttttcacagactcagaatgtatagcccgacaggacgctcagggatcttcgcgagaacaggagtgtcgaaagatcaaggccatgcgtcaaagtcacggcgaccggtgcctcaacggcgggctcaatcaaacgtccctccgtctgcaataaagggcacgtctcgagatggtcagttccagtccgcaagtgacttacataggccaggtgagggagagacgtaccgtcgccgccgcctccgccgtcatcgcctccgtcatcgtcctcgccgttgtcaaagtagttgtcgccgtctgacggagaagaggagaggactcgtcagcggtctgcgacgccgaagaaccgggacagaagaaggacgaggacgaggacagcgggaaggggacagacagtcgtcgtcgccctcgtcggcatcatagtcgtcatcctcctcttgcgagccgaggtcaccgtccgaatcgcccgcctgtaagagatggcccggacgcgaaaaccgtcagcttccgaagacgcgctgccaaagaaaagtacaatgatacgcacctcgtcgcctgagccgtcgtcgcccgagagaatgttgtcgaggttggccttcttgcggaccttcttgccgcctgccgtggcgtatcgccgtcatcagaccagtcgatcgtcagcatacgccgaagcacagccgagagcgagcacaagcacaagaacgcacccttcagcccggccgccgccgccgcccgcttcttcgccgcctcgggcgtgtggtagctgtcgtacagcgcggccggctgcagctcgcgcggcgcataatccttcgggtcgagcgtcgtcggctttgcctcggccatcttgtacttgtcggtgtagcggacaatgtctgcccgagccctcgcaagcaggtcagcgtccagtcggctggggagagaaggaagattggagggagacagaccatcgcccttccgcgcctcgcgcaggaactcgtgcccgagcgccatgtcccatccgaagcggatctgagtccggaccatggcgtcctccatcagactcggcgctgggagcgtcgggaacggatgagggtattcctggagccagtgcgaaaggggggttgtcagcccagaagggagggatgggagagggacaggcgaggggacggaccgggtagagctcggtcgactcgctctttgtcgccgccgagatctcggcgtaggtcatgccggcctgtccggggcgagtcaggggggcgagatcagcacatagcgggtgagaacgagctccgtgacccagctcaagggcaagcacaggcaggccggtgccagacgcaccatgttgagcccgtcgcccgggccctttgacccgccaaagccgccacggccgccgcccctgcctcctcgggacatgcttgaacgcctgtaagggttccggtccggtagggctcgctaggcttggatggctagctggctgggttggtcgacgatcgagctcgcctctcggggtgacgcgccggaggagaggcgggctgcgggcttctcgagcgctgctcgaaggtcaacctccgagacgggtctgccggcgtgctgctacttgcgagacgagagagtaggcctttctcggagctgaggttctgcctggcagctgaggtcggcgggagagcagtcgggtcgatgggtcggcggttgaggttaaagggggcaggcaggccaggacgctctcgcagccgaaaactgagcggccgggcagcgcgcgaggcctctctctctcgctcaaagaccgcaagggggaagagtcatgcttccaatttttgaagggcgtcgtcaaggtggtgctacaaacccatgggcgggttgagagaagaggatgcgagtgttgcggttggggtcgggagtcgatgcggtgcggggttgcgagtcggcggtcggtcgtgatggaggtggtcgtcggtgccctccttctcttgctctctgtcctgccctcaatggcggcggatgacgcgcatgatggccgaccgtgtgcggccggacgggacgccgacccacttctcgcgcgagtcaacaaaagactggatgcggaggttctttgggaagcggccgggctgctcggccgcgtaggtcgcgagcatggcgaccgggttgtgggcggctgcctcggcgacgagcgccttgtacgacttcggccggacgagcgcggcggccgggaccgacgaggccgggacgagagggagcgagacgtcctgcctgacccgcgggtagagcgggtaggggatcgggttcgacttgaagcggtccttgccgtagagcattctgcagggcaagaagggaggagcgagcgagggttcagcccgccgaagcctctctctcccgaagacgagcgagcgaacggtcaggccgacgtacctgggccaaggtctgctctgggtcggtcccggtgaaggtggtggtggtgggtggtaatggttccaagactcgatgagccgctcgtccgaccccctctcgtgtcctcgcgcctcgctgtggagcgcgaggccagcgccaggttgcaagagccgacgtcgaccgatcagcctggcaacgccgccgacgtctcgaccctcagacggccaccatcaacagcatggcagaccgcgacgagccggtgcgccttagctctgcagctctgctttcaaaggaggctgctgacccggtcgctgcccgcgcaaacgcaggtgttcgccgcgacgctcaccgacgtccggcacttcacgacgctcctccgctcggtcgccttccagcaggtgcgactcgagtgagcaggacctctccgacgctctggactgacccgagctctgtgcgcggctcatccagcgcgtcacggtcgtcgcgagcgaagcaggtctcatggtccaggtcgaggaggcccgctcgctccagtgtcagtcccagcgccatcgtctcgcatcctgccgcactcgcaactgacgctctcgcctcatccgaccaggccgatcctacataccgagcaacacattctcgtcctacagcttcaaccctcgtgccgccgggattgaccccgcaggcggcggcggcgagcgacccgacgaggacgacatgctgacgccgccgccgccgccagacgtcgcgctcgagatcaacctctcgcatctgatcgagtgcctcaacatctttggcggcgcgggcgggatgggcagcgctggcggtggaggcgaaggagctgacggcggcggtcgaaggaggagaggcgagttcgagggcgacgacgacgacgacgagggcggcggcggtgggtttggcggccggcgaggaagaggcggtggagacgggacgagtcggacgggcaagatgacggccggtaggatcagctggctcgggcctggtgagccactcgaggtcctcttgtgcgttggccgtccacctcaccctccttctgcgtccgcgtgctgaccctggaatcgccaacttggtcccgcctaatcgtcaggatggacgagaacgccggcccgagcgcgccgacgacgacgtgcagtctctcgacctccgaggccgactttgagagcgacatcgagttccccgaggacgaggagccgtgcgcgtcttctcttgactttcgcgcatgcaccctcgctaacctcgcatccctccctctgtgcgccagagcgctccacatcatctgcgccgcatcctggctccgagacgcgctcgcctcacttgacccttcctcgaccaaagtcgccctcggctcgctcgccccgccaccctccgcgaccttcttcacgcccgaccgtaacaacagtgacgccggcgctggcgcccgcgcaggcgagggcgagaccggattcgactttcggatcgagagcgagggtacgtggggcgacgtccggatcgactttgagaacaagaagccgctctgcttgagctttgtccggacgcggtcggtcaggcatacgtgcgtctggcgcacttgctactcctgaagtcgccctcccgataactgactttcgcctttccctcggacggcgctgctcgccttcagctaccgcaagatgctcctccagcgcgcgctccgcgccctcggcgcctcccacaaagtctcgctcatcctctacccctcgggcgtcctctttctccagtgtatgctcgtcgcgccggcccagccggaggccggcatctttaccgaggccgagcgggcgagacgcaaggctgagcgggagatgcgcaagaggggcgaggtgacggacgggatcgttgagctcagggtgaggggctcctccgtcggttgacggatgtcgcgcagtcggctgaccacgaacggtaatcctctgcctgagcagatgatgtcgctcgaggaggagagcgacgacgagcaatagtccctcgcgtcaagctcgcaacccacggccaagcaggcccaaggtcaatctagccatccgaattcgagcgccgaactcgagtcctgacagcacgacgaaaatctgacattcggcccactgcccgcacctccagtctgccaacatgcccatcgcgacctcgacgacaccgagcccgaccctggtcggcatcaacggcttcggccgcatcggtcagtctttgctcgctcacctgtcttgtcggaggacgagggacaggggcggtgaggcgtggcccgcagcagcccccttgactgacctccattcctccgacctcccttctgccttccttgctctacaggccgagctgccttccgtgcctcgctcgccaggaccgacctgctcgtcgtcgccatcaatcacaccgccccctcgatcgcacacttgctgcatgcgatccgcttcgacacgacccacggccggctctactctgagctcaagatatcggacgacggcgttgccctcatcctcggcggagcattgtcctccatgcgaaaccaagtcaacgccgaggacggccagggtcggatcgggcagaccgacgtcgacgggctcttcacgcctgctccctacctgcatgtcctccttcacacgaaccgctcagacgcttggcctgaccgggtactgctcactgagagcagtgctgactgccgacgacaagtgcggcggagcatggcggcggtcggcgcgcagccgctccggccgcgcgcgctttcgcccctttgatcgagctcgctttccgctcttgttccgttcaaccaccaccatctccaaccgagcctctgcccaccactcagcactccaggcctcctcctgttttacacctctcaccagagccaaggtcgatccggatgtcaaacagctcgaaagcgcctcctgacggcggcagcggcggcggcggtggcattcagctctcgcaagatccccagatgatctccctcgtcgaaaagctcaaggagttcagggcgctcgggatgaacgtgacatactcgatcgagccctttccgcagcgcgactacatcgtgttcccgaagacgccagaagaggcggcagcactcgagggccgcctcacggccgacctcgtcgagcctccgcgcaagcccgagtgcgtccccctgtcgagctccttcgctcgtcgaccgccttcagcaaacatacccttgctgacctccagtaacttctcccctcctcgtaggcttagcagctgtgtgtgtgcttcgcgatcctcgactcgtcttagaagcgcgcgctgactcccgacctcgtgacagggccgtcggccgacgacgtcgtcgccgccttcgacaagtgctgccagcgcgtcaagacgtcgctcgtcgagagcacgtggcctcggcagctgctctcgtcgcaggcctcgctccacaactcgacgacgccagttgacgcgctcaagccgatcacgctcaaggcgatggtttattcgctcaagcacgaggtccgtgcgagccactgccaggcttgctctctctggttcactcttgctgaccctttatgcgctttggtcccgccagggctcgctcctgttcctgcgcgtcatctcgtccaactttcgtgatggagaggtcatctttgttgcgtgcgtccccgccgtagcttgtcgctcgcgcgctcatactgctaactctggcggcctctcgacctacagcgaagacacggacggcacggccgtcaacgtcgattctcggcacatgccctgggcgctcggaacgtcgaccgaggagctcaacgtcattctcccgctcggctcaatctttgccgtttgcgagccggccctgcgcgagcacctgcacgaggacaagaccaaaaacaagaccaaaaccaagactaaggacgaggccgaggccgcagcgatgccggtcgtcgagatctactcggccaccgacttcctcttcctcaccgaaggccacggcctaccttccgacctcacctggcgcgattcgttcctccctccgagcgcccgacccgagacgcaccgtagcccaaaggcctgtaaacggcgcagcaacaccctcgccgccaagggctggctcgacgccgccaagaacgccttcactcgcggcatcgacatcgaggacgccccggccgtccgcctcaagcgcggtcagctgcggctccgtctcggccgccctcgctctgccgaggccgacgttgcctccatcctcgcgcgcgatcggtccacgctttcggccggcttggtcgagaaggcgcttctgctgtcggcaatggcggccaaggaccttcggcggtgggaccaagccaaaacacgcgtcgcccagctcctagccctttgcccatcctcgctcgacggccgcgagtagcggtcgaaggttgcggcctggctcaaggaggcggagacgggcgagttcgactttgcggctctctacgccgccgcacagaagcttggcggcaaggtcgacgatgccgactggatttcaccggcgatggagtgggtcacttcgacgaagaacctcgacggccgttccctttccgccgcgcgcgacatcgaagctagcgagctgctgctgatccagaagccgtgggtggcgtgctcgctcgaccagacgggcgaggagaaggggctcgaggtctgcgtcttcgagggtgacgccgccgtcgtccacagcaccactgcgtaccacctgacgcaccagattgccaagcggtgaggtccggcagctcttcgccggtcgccagaaccatgttgctgaccttgcctcgctcctctctccgctctccgctcgctgctagcctcatcgatgaccctacgtcatatcaactcttccgctcgctgccggccgccggacgtttggcggcggagaacgtgccttctcgaccagcgttacttgtaaacgggtctgtcgcgtcaccctcacgttcactccgggacgaaactgactgacgacctctccgagccctacagcgctcccggtcctggacgagactcggcgccgtcagctgcaaccgctagcgcaccggcgttgctcgccaccgctcgcgctgccggtcagccctccttacgactccctcgagcaacgctcgacttctgcacgatcccggctgcccctcgacccggaatctcctgcccttctttcaacatctgtctccaatcccgatgctgcttctgccggatgagcgcttgcgaacctagcctgctgatgatgggcgagacttcgcccgcgctaccaagtctagtcacggcccatgcgatcaggcctgcttgatctgtacgtcctgagccggtcaaaaaggcacgttagggcgagaatccttcagcgagagtatgcaagaacacgtcacgtacctgcgtctcgacccgcgcagcagcctcgcggacggcctcctcctccgccagcgcctgctggtccttcagccgacgcttctcctcccgctccttcttggtacccctgcggaaggcctggccctcccagcccggtcctggcagccgtgcaccgagctcagcccgaagctcgtcgaccggcatcgcccagcgcttctcccagaagacgccgatcagcggcttgcactcggcggccgcgctcgccgcccagggcaggtactgctggagcagaatcccgcgctggtgcgtcgtgagtgtgttaaagggcgagaggatcgtcaaggacgagaggaacggcatcgggagccgatagtgcgaggcctcgaacgccttgagcgcaagctcaggcaggagcgtcgtcggcaggtggaagagcacgtgaagcaggtcgtgcgtctcgctggtcaatcgtttaaagtgcacagtcagtcgtgagatatggccagctggcgagcctgtgtaacgcaccgataccgttgcaggacgtaggccagctccgggtcgtcaacgtgggcgaccggcaagcgcgtgtctgggctgacgttgcaccgctcaagccagtcgcagtactcggccccgaacgtgcctgctggcagggcccgcaggtaggcgaggtcgatcgtctcggacgtgatccgtggcctctcgcgaaggatggttcggccctcggccgtcgtgagcattgagtcgcgcagggccgggaggaacgggcccgacgtcgtctcggacagggcggcgatcatgtctgctcaaagggcggaagacctggtcagtttgatcaactaccctgtgtccaacgtccctcacgcacctgcccgacgaggattgaggagggctgcggtcgctgagccggccgtcagaacaaccttctcgagcagcgtcagcgggatgtggcctgggtagcgcggcggcatcgacgagaccgcccggaggagccgtagcggcgccgggctggcgagtcgagcgagagggatcggaaggcgcatcctaacgagcagagctgtgaataagaagagaaggagaaaggtctggcggaggttgcgatgctggccgtcggaaaggaaggccatgacgaggacgcggaggtcgagttgagcttgctccccgaccagcaccctcatctgcgccgcctcgatcctcgtacattgtccctcttagtcggcccctagtagcatcagcagcctagcgatgcgaccgacgtctgcctgctcctcctcttcgggcatcctccggccagcgcggctccgcttcgcgccgtcgccgaccggcagcctgcacatcggcggcctgcgcaccgcgctctacaaccacctgctcgctcgcaagtggaagggcaagtggatcctccggatcgaggacacggatcaagtgcgtgcaaacccgtattgcgtacgggccagttgatcgagagagacgatgagggctgatcttcctgatcgtcgtccctgtcggcccagactcgactcgttcctggcgcggtcgacacgctgcgacgaagccttgagtgggccgggctcgactacgacgaaggtgcgaggtcgagtgtactctcagtctcgctcgctgctgaccctgctaaactttccgtcaggccctggtgtcggcggcagctcgtcaacctacgttcaggtcagtcgcgtgcatagagcccgatcggcgcagcgggctgacgcgacgacgccctttagtccgagcgcctcgacctctatcatcagcacatcaagattctgctcgaagtgagccagtcgtgtcgatgtcggttccttcatcgcctgacgtcgttcgctccttgtccagaacggcctcgcctaccggtgcttctgcacgccgaacgagctggccgagatcaaggctggcttgcgcgcccagggcagccagaacacgtacgatcggcgcggcttctttctcaccgaagaggaggtcgcgcgcaaggtcaaagcgggcgagaagcacgtcgttcgacttaaggtgcaccgtcgcgatctcagatacgaacctcttgcgctcgctgactcgctggtgttcgcctgagcagagccgacctgacgccttgccgtttgaggacctcgtttttggaggcaaggaagcgatgcctgccgcaccgatcgacgacgctgttcttataaaggccgacggcttcccgacgtaccactttgccaacgtcgtcgacgactacgagatgggcatcacgcacgtcctgcgcggtgaggtgcgtttcgatgactctgatacagctgctgctcatcattgacccttcgtcatgctgcgcggttcctcaggaatggctgtcttccgtgcacaagcacttgcaactctacgacgcctttggctggacgcggccagactttgcccacctgccgctcctcatcaatgccgatggcaccaagctctcgaagcgcgacggcgccgcgtccgtcgagaactacgtcgtgcgctcgtctgaccgccttggcatagaaggtatcctgaagctgaagccctgccttcctgtaccctctcaaaaggagaagggctacgatccggaggcgctcaacaacttcatcgcgctcctgggctggaacgcgaaccaatcggcaagcagcgacaagaccgcgtccgcctcatccgggcccgagagcggcgagcaccaccgcaacctcaaggacaaggatccggatctctcgggcgacctcgactttatgaccatgcccgagatgattgagcgcgtgcgtctgtctccgtctcgtgcacttgcccgcccgagcttacactgatttcccctcttgcgccagtttgacatcgccgatgtcacgcgtggccgggcccaggtccagccggccaagctcgacttcctccagaagcttcacttcaaccaccgctgggcgtcgtccgacgacgcgaaggtcagaatggtcgcacagctcaaggccatcacgcaagagcgctatccggcgagcgagctgagcggcgacgtggatctactgcgaaggatgatcgagattgaccgggtgcgttttggcgaggcctctcgacactgaacctcggctgatccgccgtcccttgcttcgccgacgcaggtccgggtcagcttcctccacgaggtcgccgactcgtcgttcgtcttcgaggagcccgacctgtcgacagccgaggccaaggagatgcagaagaagtggtcgaagcactaccgtgtgaccccgcgccgtccctgctgtgcctcgcgcctgggctaattcgacctggcttcgatcctcacagagcactcgatcgaggttgctacttcgcgcctctctgagctcaccgatgccgacttcggcgacgtcgatcgcccgttggccatccttaatgacctcggctcgccgccgggcgacaagccgctcaagcgcgcgcagctctggatgccgctccggcatgcgctcacgggccgcaaggtgcgagcagttccgagctgggaaccgcccttcgacagctgacactctccctccttttcattgcccacaggccggccccgctgttgccgaggtcgcgcacctcatcggccgcgaacgcacgctcgcccggctgcactctgcgctggaatcacatcagggccaggcgcctcggggctgatagatgggccctttgagaaagcacgacgtgcatgagatcggcgctgcatgagcagatagatagtctacggcggcgtgaggggtccgcaagctgatggtacaacaatggattggaggcgggacgaaggatcaggcggccgaccgcccgtccttctccatctgcgggaggtgcgtcgtcgaccctctgcgcgagacattccgcgaggccgctctcgaagcggcgcgcgaggcgtcgccctctatccgcttgcgcacgcgctcggcctcgaacgcgagcgcctcgagcaggagggccgaggcgacttttgagcgcgcgcggaggcgcttgccgtagaagaggaggaggagcgggcacaggccgaggacgaggccgatgcagccgagcatggtggatgcgctgggttggtaagagtgggaggctgtgtcagcaggaagcgatggcgcggcggagtgcttcgagaaagagggcgcactagcgaggcgtcatgttggagaacatgcttgggccggccagaggaagaacggcggccagcaggttgcgtgagagcgactgcgcactgtgagatgcgtcgagggcggtcagcgtagattcacatgtgagtcggctgagtgttatgtgagaacggacgcttgagccgacgatgagtacttctcgtagctgttgaagattagaggaacagtcagttttggagacatcgcgcatccgtcgtacgacgggagactgacgcatcggcgatgtagttgaagacgcccgagtagatggcgaaagtcccgagctgttaaagcgggctgaggtcagctggtgcctccgatgagcgaaagtcggatggacgacgtacgtaggcgaggaagaaggcgacgaccgagacgggccaggggaccgacgtctggcccgtccacgcaaacataaggatgccgagcggaaagacgagcgcgccctggagcaagaatgcagggtaaggctcgtcagcgagagatacctgaggctcggggaaacggcaggcggcagacgcacaacggtcgcgcagtagagccgggcttcgggctccgctcggccgctcgggctccggcgacgtgcgcggccgtagagcttagcctggagagtcgtgtcgattgcgattccgacgaggccggcgacggcgatggagctgcgtgggtcgcggtgaacaagtgagtgagagccagttggccgtgcgagatcaaaggcagcggagagacacacaagaggaccgtccccgactggccgaccgagaagccataggcgccggcgtagacgctgctgcacatgttgacaaagagaaagagacagccccagacaaagcctgcgcgcaggatgaaagcatcagtcgccaaccaggggcagagcgacggccggagccaactcaccgacccagaccgagatggcgccgacgatgggctcggtcgtcaggtagacgagcgggcgcgagattgattgagtgatcatcgtccggaggtcggcgcgctccgtgtcgccctacggtccagcatagaacgtgcagagtcagccgatcggcaagacttgggaagggacggacggggccgaggacgtaccggagcggcatgaagcctgcccgtctcctttgtcagcctcatcgcccgctgcgagaggatgtaagatccgcgcgtctccttgaggacgaggcaggccgcgagaaagattgagccaaagaggatagccatgatccacaggacccagcgccagccgagggcgtcggccgtccagccggcgtagagcgggccgatgccctgagcgacgaaatggtgtcagcttgggcaaggaagaactaaatcggcagcaagaggtcgtacttggccgagaaagacaaagagcgcgtagagactcatggcccgaccgcgctccttagcgtggaagaggtctagcgagagacaattgctcgaagtcagccgctctgccccttgctgcagaccacaaacgctcgggacgcaccagcgatcgtcccgccgaccatcgagtttccaacgctcgagcacatcccctgaaaccagcgggcggcgaggatgccgttcatgccgggggaggccgcctgggggatcgcgagcaggaggttgagcaggcaggtgacgaggtagatgcggttccggccgatgagctgcagatgggggaagtgggtgtcagctcctgatgggacgtggtggtaaggggtcggttgagcacacctcggaaagcggcgcaaggaagagcggcgtgatcgagatagcgatcaggtactgcagatgagaggaggccgggtcagcgggccgtaaaatcgggcgccaggaagtgaagagggacgaacgagggcgttaccgagcgtccattctgtccggctgacgccgaggtcggcgtgggccgactcgtacgcgagactgtagccggtcgcattgacggcttaacggaggggggggggagggaggggcagcgaggtcaggtcaagtcggcgcaacaacgaaatgagtcgacggagactgacctgtaagggacgttatcgagatggcgcagacagtgatgctgtacttccggaggttggctggtagggaggaggaggcgaggtcgagtcagggctcggcgctggccggaaaggcgctcgcaagaggctgagcaacgcacaccagttgaagggatcctgatcaggccggatagagagcgagcgaggcgtcaggacaagggcgcgagcgaagccggctgaagacggaatggtgcggcgagaaccgagtggcgcctgcggagcgaagcttcctttcgaggctttcggcccgaacgcccgccggctccctccctcccacagctcgcgcgacaacgcacctcggggtccatatcagggaaatcaatgtacgtgatttgctcgtgggtgacagtgtgcgtcaagggctcgccgaggaggacgcccctgcccggccgggtcgggtagaccttgccgctcgagtcggtgacggtccgctggcgggcgagcggcgtcgtcgcgcctgccgctgtgagcacgtcaagctcgagtgcagcggctgttgcggccgaggatgaggctgacgaacacttagatgagggcaggtaggggctgtcgttgagcgtcgggacagacggcgacgctggtggcagctcggtacgatgacttgccaccggcagggcggtcgaggggctggaggtctgcatcggcggtgaagggggccgaggcggtagtggcggcagcggcggcggtgacgggttctgtcggttggagagcatgaggagcgacttgtagagggctgtcggctctcgctcgcaaggtgagggctcgagtgctgctcgctgagggtggtagggtcgagcagggcgaaggacggtcgtctgcgcgcggccaacttcggccggagccgccattcggccggcgttttcgaccgagccccgtcggggaaatgccccctttccaacatctggtgtttgaagccacgctccgctcgcgtggctcggtctctccccgcctcgcccgtcggccgcgagacacgcccggacacgcccgccccgacacccttccccctccagcccaccatcgtctgcagcttcgccctcttgcccgcccttttgctcttgacaacgacgacctttcctcctgcccgcaccctgctcccttagccctcgctgccgccctccttctgcaactgcgatgctcgcccctctcctccacctcggcctcctgctcctcagcaccctcgcctccctcacgcacgccttgcccgtcacccccaaccgccgccgcccaggaggaggctcctccgaactcgcccggcgcgcactcgttattccggaagcgtgcgagcagacgtgcagctcgtggagcgcggacggcgcgctcggctcaccgtgcggcgcagcggccagcaatgctaccggcgcctgtctggaagccgtctgccagtcgaccggcttagacagctacggtccgttcttccctgagctctaccaccgctcacgatcttcgcgaagctgacactctcccgcttcaactgtctcggacggcgccctccagtcagctgcgcaaactgcgtgattggggcggccagcgccgtctccgagaccgactactcggccatccaggcagggctcgtccgtacgtaccttgccgaggaggctccggctgagcctccatctactctgatcgctgacgcgctccacctgcgtctacctgatctttggcttcccccgccgactctcgctcgaccccgggtaaggaggaggaaggcaagaaagttaagggaggcaaggaggaggagggaagcaaggaggagcgagggtggtcagcctgggcgttcttgagagtgtgcgtttcgggttcgatggtcgcgggcacgagcgcgggaaggtcgagcgtctcgaacggaacgcaacagcccgagaacgggaaagaagcgggtgtgttgggaggcagagagagtggaaaaagggacgcgggcgagacgggttcgagcctaggcgttccgttcaatggatgtattgaaaggagggagaggagaggagaacgtgtgatggcgctcctcgtcgtcctggctctcccctccatcaagccgccacgccgccttttcgctatgctcgccccaacccaacccgtccctcgagtgcacactcggtcgctcgagggccggctgtgatgccagagctcggagggcggggtatgggaggaaaagaagatgggacggagggagtggtggacgcgagaccgcccctccggggccgagaagccgatcgagcgcgcgccttcgagctgctccttcgtcgttcgtgtgacagacgactcgcgagagaccgggcagggaggggatataccctgctcgtctcaagcgagaggccggagacgagccgagggggggcgaagggcggcaccaacgacgaaggagcccatctcccttcttacctggctgctcgcgcgcgcgaccagcccagggaggaggcgggctgacacctcacctaacctctcatcgaccccttctcctcctccctcaagagacctgcgactcccccagaagccagcggacagatgcagagggagaagaaggagagcgcggacgtactccggatccgctggcccgagagcgggccgtgctggtggtggttggtcgccatgccgtcttgctggtcgtcggctggcggtgctgctgctagaggagggagggtctgcgagctgctgctgctgctgctgggatggggctagtcgctgatttaaaagcgagcgagctggctgtagtgttgtgctgtgctgtgctgtgctttgagggtgctgatggagggtggcccaagggttgaaggtcgtcgtccgagtcttgctgtctctctggccatctcgtctctctccgcccgcgcgcgggtcagcaggcaggctgtttgacgcgggtctcgctttcccgactcccagtctggcagcaatccaaagagggctcgatccagcttctcgctaaggatgagctagacgagcgcccctggtccttgcactcgcttgctcgctcgctcgttcgctcgacagccttctgctcggcggccaagaatggcagcacgctctcttgcagcggcacgagtagcctcagcagtagggccgaggccctccgcgcgcgcagctcttctcctcttctgtctccagcccgccagccagccaccgcctctctcctctcttgaccctcacactcacttcactcgcctgcccaccttcgccgttgcgctcgccctcgccgtctgacgccgaccctcgagagcgagcccaagcgccggccgcatgcccttcgacgacctcgacctcgttccccgcgcctgctgctcactcagcagcgccagcagcacgcggtcgatcggccggccgacgtcgtgggccagagggttggaacgcccgtcgtcggacccgaccgacgacgacagctttgccgtccgcgagcgatcgctcggccttgagaagcagggggcagcagcaggcggtctgcttggaaaggtgttggaagagcggtcagtgcttagctcgacggcgggccgacacgagccggcagggggtggtggtccgtcattgtcgtcgtcgtcctcgacaccggtcctcaaccagtcgctggccgcctcctcatcctcgttcccaacctcactcgcaacgcgtccggatcctcgcgctctcggccagctcagcgcgccggtcgagtgggcgccgtgcgagccgcagcagacaagggacgacgcagccgggccgtcgttcttcgactgccgtcgcccgcagcacccccagcagcagcaggcatcaaggacgacgcaccacgccccgcaactcccacttcgtctccctcgcctcgcaccgcatcgcccgcctctccctctagcccccgccgattcctcgccctcctccgcctccacctctgcctcgcgctcgcgctcgcccatccgcgcgcggccggtcggccctcctctgacggcggtacgcgacgctcagcaaaaaccagctcatgccaggccgtcagcgtcgacggcgacggcgtcttcatcgctcctcgtcgtcggtcctccggtcgggagcacatctgaccgactgctattgtcgccctcctcatcggcctcgcacgcacacgcccaccctccctcagcgcccaccgtcactgccagcgcaacctgccatctatcccctcacccttccaagtcgaccctcactccgaccggaactggcagctcacatccagcgctctccctccgcgccgccgcccaacgcgcctcgcgcgggcctatcccgccgcgtctcgctcattcggttgtgctccgttcgccagagtcgtgcgtcctctccctcccccttctgactcctctctgcttctccctcgcactcgttcgcctcgcgaggttgcgaggttgcgcgtacaaaaaggggcaagcggaacgacctgctctcttaaggcgcgtttgcgtgctcgaccgacggcgcactaacaccccccctccttttcccctccttttccccttcttttcgcccctcccgtcctcaggcccttctacgcacggacattcggctcctccccttccccctcctcctcggtgtcggcatcagcatcagcctcggccggccgccaccgcgccccgctcgtccgcctgggtacacacccctcgccccgccgggccgacccagaacgggccgccccaacacgctcgcacagcgcacgacatgtccgacctgaagaagtgggcgtgtctaagcgcgagcgagcgggagcgggagcggcggacgaaggggcagaggaggcggaggaggacgggaggcggagacgagtcgggacgcccgattcgtctcggcgccatgtagacacggaagggacgacgccgacgcgcgagagaaagactttgactctcgtggcgaaggacgaccgtctccgacgagcgacgagtaaatcgcttcctaccgccgcagccgcttccgccttcgacgctgatcagaacgacgacgacggcggcggcggtcggccatcagcaaactcgccagcggcatcgcctttgctggccaggaccgacgccgacccctcttcctctgaggccgacgcgcagcacgcggagttgacggacggccaacaacagccgactggcccttccgctgccggcccatgttacccgcaatcgtcggcctcggcgacgtccgcgaacgctgttgagcagggcgacttgagggcgcttgaccgcacgttcgactccccggcggcggccttcgatgaccctccgaggagcgagccgatcgaccggccccgagcgaggtccgtcctcgacgccgccgccgccgacgacggcccacttcgcttagcgtccgtcggacaagtcgcacgtgacgtcgacgagcgcttggcggttgagcgggatgcggcggctgtcgactctgctcagtcgcgaaatcaagcggcgaggggccggtcgtcttcctactcagcggccggtctttcttcgcccgacctcaccagcaccgcccccgatgacgacgacgacgacctcgataccagcctcgacgccagagacggcaagtcgcgcgcctcgacctcgacctcgtcgtcgtcgtcgccgtccttgtcggaggaggaggacggcggcggaaagcggccggcggtcgacgagacgctccgccggaggatggcgtgggccgacttgatgcttggctttcggtcgatcgaggttgacgacgacgaggacgatgacgacggcgggcaggactgacggccgccctggcgtaggcaggctgacggttcagtcgctcgcttcggggccttgaaggacggacggacgcgggcatcctctcgcgcgctcttaccgtcggtcggtccctctcgctcgcgatctcaaccccctcctcgctcgcacgcgggcactcgttcgcagaggcgcttgtatcggtccgttgacgaccgcatcaggccggcctctttccctcgctcgctcatctcgcgcacggaccgcaaaaaacgggggcgccgccttatcctcgcaggcacggatgccggccttgccaagcacgtcgcctcgttaccttcggccgagcggccctgtcactcctttcttccacctctctcagcgactgcctttaacttccttctgcttctacgcctcaatgtttgcccttcacgcttctacgcctgccctgcacctctcccttcctgtcctccctcccaccttgcctctcgactctgcacccacccctgcacatctgctctcacccttccctctcgcacccgctcctgccgcttgacgaacccttagatgccccttgacgaacccttagagacgacccacttgacgacgatcgccatgccctgcctgacgcgacgccgctcgagagagggaagagcgaggcccgacccgggcactcctcaacggctaagtgacccacctcccacgccgacagacgagcgttgacaggcaagccattgcttttcgagaccgagcgaaggtaaggtttacaacgcagttccacaattgataaaaggggaggtgggctgtttgatggacacaaaagatggggggttggcaatccccgtcgagcgcacttcatcgcctcgtgtgtaactgaggcagggcggcgggacgaggggtagatgtgtgttgggctacagagaaagggtgccgggcaggcaccgttctggtttgaaggacggccagaagggtggggtgcgtaccggagcgggaaaaatctaaagtgggcaaagggggaacagggcaggtatacaggcaggggttggggttaagtagcacgggagagaagtcgcagacattgtgagaaagagatggagggcagaggagcaaggggccaaaaaaggtgggaccggtgaggggcccgcgaagaagagcggaagacgtcggtgtcgagccagatgcgatgccggtgggtgtgtgggtttgaatcgggggtccgggagaaagaggtgagtcgtgaagtagctcgaagagatgcgaggccgagatcggatgcggagaggtcggatttgcgcgcgggaactgtacgtcattaagggggcgggtaggcgggccgcggtgggccctttagttggccgaggagggcgggatgctgtaatcgacattgttggccctcgcccggccctggatcgacgagaagacgacgcgcggctcctggacggcgaagccgtggttcgagccaacgacgccggcaacgggccggtagttggccagggggaccttggccgtcaaaggggcaagcgagccgccggtcgggacgcaaaaggacgactgacgcgagctctctgcgctgccgacgatgcacgggacgttttccgagtagggcgaaaacgtcggcgtttcgggcatgtcggactcgatagagatggccgagtcggaccgccgaagcgagggcgcgctgctcgcggcaaatgacgagcggccgctccagctgaggctgctgctgctgctagagagcggaagctcggacgaagcaaagtgccaggcgtgcgagggcgcgaccgacggcacgtgaagctcgaagcgccggccgcggaggtactcttcgcggacaaagagcgaggcccggttgtaatagttgtgcgagtacttggtcgtcacaatctcggagatggtctcgagccgctcgccgagcaggacgtcgagcaggaaggcgacctcgaccgccggatcccgctcgtcgacgacccgccgcggccggttgagcaggaagcgggcgacgaggagagcgccagcggcgagggccgacggcgcgaacggcgtaaagtcgtgcgcaaagagcgtgagctccatgatgaagcgcgtcacgtgctgcgtctcggcatcctcgatcgaggtgcccatgcacgagagccggagccacgactcggccgtcggatgaccgacgcaccagccgatggtcgacaggatgtggccctccatctggatgaaagccgactcgtcgtaggcgttgcagcacatgtcgcgcagcgtctcgaccgtcggcacgcgctcctttgcgtcctgttgaagatggcccaaagggaatgaaagtcagcgatcggccatcggccacgaagaaaacacagggaagaggacgcacttcaaacttggcagcgatccagaggctggcgcagccgacgagctgatagtgcttcttgaagacgacgcgctttgagacgtagcgatcgacaatgttcatcgcgaggtagaggacctcgggccggagccggaactgctggtggatctcgatgagaaagtcgacgaggtagggcttcatgtagggcttgagttcgggctggagctccatccggacaaggtcgggcatcgtgacgcgctgcaagagatggcttgactgtcagcaaggaggcgtcgatgcgagagaagctcggatcggggaccgacctccatgtggtgcatgtgctcgacgacctcgtcctggtactcgtcttcaaagaggagcctgtagcgcgacgtgtcgaccgtaccggccgagccgagtgccgccgtctggacggcagccttggccggtgcgaccgctgcgaccgccttcctgagcgcgtcgatcggtcgaggcgaagagcgcttggcgacgccgcctgatcgcgtcgtcgacaagttcagggctccggcacgcgacgacgacgacggtgcagactggaaagacgcggccgacgaaggaaacgagacggcggccaggttgctggtcgagcaagacgcgcgggccgacgagttgtcgtgaaagacgtcgtcgacgacgccggccgatcgcggcgaaaagacggtcgacgcgcgtttccgcgaccggttcgagtagaaagtatgccggctggaagatgcgggcagggctgccgaaggagaaggggcggacgacatgtatgagaagcgctttttcctttcgacgcggcggcgagatgcgagctgctgttgattgccggaagggaaggggcgacggctcggccggtgggcacgagaagggcgtcggtcgaccgagagaaggagagaggccgggcaagagagagcgatataaggcgagttggccttagagcgagctgagcgaagaggaggagatctgggccggtcttgtgggcaagaagagaggcggggtgggccggaagaaggcgaagcttgccggaagcagggaacgagaggcggaaggacgcgatgcagggtggccgaggaaaagagagggcttgaaggaggcgactgggaggaccgggaaagcgagcggcgagtttgttgctgggcgtgtgggagagggacgaggcgacgactgggaggagaagtcggttgggaaggacgtgaaaagcaagtaggccggtcgagcgagcgcgagccgaacggagggggaagcaaagggcggaggagttgggggccggttactggccgtggttgtccggcagggcggtcggtcgggcagcgcgcacgcgattctgcggggggtgggaggggggcgaacttcggtagcctttcagtgtagtagtcttcacggcacgagggccgcaggccgctcccgatcggcagagagagttgggccgtgcttgggcgtgagcggccggcgtgaaaggcgagcggtagaccgtgggttgtgctgggttgcgcccccagccggtgcgaatccgtggcgggccttcacacgaacccaactgggctgtttggcgaaagggttcggctgcggggcaggaccggcacaaggttctcggcctgcgggcgttcgtgaagtaattcggtggtgaagcttccgagcttggcccgccgcgcgcgagcgctgctccctccaacagcggccgaggaaccggcacatgcgagcgcggtgaaggatgcgcgccgcgcctgttcagcccccatccgctcgtctggtcctgagtgtcttggaagcttcaggctccgcacagcctacgacgctctgcaagagggctcccgcctgccgattgccgacccgtcctgacggtcccggctcagtagcgtcgttctgcctgctccttcaaaggagcaagaagaggactacttgagcggtcgcgaagacgtgcagagaccgcagacacggcaggtcagcccacggatgtgagcgagcattcagcatccgctcccgcgcacacttttgttgttggccgccgcccagggcgtgccgattcggtgccatcgtccagcagcgctgcctccgtcagaggctggcgcctcgcctgaagtgtgacaccttcgggcgcggttggcaaagtggtgaaagggcaaaggcagtcacgtcccgcgccgcgcgtggccgccgctgacatcccgttgcgggggtcagccgtcaccaaacgccttgttcgagagcactcaacgtccaaacccgcgcgcccgcctcccctgtcactttcgatgggcgggtatcagcatgccgagccagctggctggcctcgaccgacgacgccgacggcacctggtgaagcctgctacctcggagacggcgggcgacagcgacgctgcctttgcggcgcaataaaagggcgagcaagccttcgtgatgggctcgtaaagtaaagggcggggggcaagagatcagacacgtccgaggggaagttagccaagatcaagctcgggcaacgggcgggctggaaggggtcggggcgctgatcgcacccgagcctccggacaggtccaactgctgccgacgcccgagcatgctcgacgagccaaagcgaccagcagcagcagcagcagcaaggttatgaggagcgatcgtgatggggacgagggcagcccctcgccggagggcaagcgagactggccggcccggcgaggtctcgggtcgaacgtgctcgctgcacgccctttcgcggaccctatcgctctgcgagtcggccggaggagaggacggtcgtcagctcatcagcacaacaggcaagatcgcacaagagcccttcacctactcaagaaggtactgacccgaatgaggcgtggcgagctgtgccctgcggaagctagccgagccccttggcggtgggccgctgtcttcctgtcgccgatgacgagctggtccacgagcggacgtgcgaaaggtcggcaggcggaggtaggcagaggtaggcagaggtagctagggagagacgggtcaagccggtcaaggtcgcagggtagtccggggtggcggacgatggagggcaggcaagagccggccgaagacaaagggggtggtggggggcttgggtcgcagacaggggtgcgctccagaaagggcgttaggggagagaactcattcgatggttacaggggaggtcaccagagcgcggagcgaggaaaaggaaaatgggcgagaaggggaactacgagaggcctggagtacaagggaagggtcgaggaagacggcgagtcgagaaaggggggagaggaaggggggttgtggtccggccgtcgctcgctcaggccgtcgtgccggaggtcgcaggcgcggagacctggtcgacatcgcggtaagcaggtaggacaacctcctgcgcctgctcctccttcaggaaagccttctcgtccacctccacggcgttggcttgggcagcggcccgagcggcgactcgcgcagcgcgccggcacttgcgcgactggcggccgccgcagggcgaggatccgcacagcttgcgtgcccggtccttgcgagcctgccggcggaaggcgaggaggcggacgatcttgaagaggatgccggcgagagactgcgagatgggaagtggaggcggtcagcacgcatcgcgcagtcggagcagggcgccgtcaggcggagagacgcaccccgaggccggcgccaagcacgaacgagacaaagagaccttcagcgaacgagagctcctcgagcgcctcgttgaagcggccgagggcggttgcctgccggtggtggccgccgtgcgctcgctctcggtcgtggtggagccgggcgtcctcgaccgaggcatagcccgggcgaccatgaacacccgcagcgtgcggagcgacgacgacgtgcctattggcgtcgtcagtcagctggatgatcgtccacgagctggggtggtggcgatcaaggtcggtggcgacggcggcagcatcagcgcgggagcggccgagggcggaagcgagccaggaccggaggcctcccgcacccgccggaccattggcgctgccgtggcagggcttatggtggtggacgggcagcgagaggagagttgcctcaggccccattgctaaggcagccgggttgaagaagggagcggcgaccgtcgacgagacggccagcgcgagggctgagcgaagcgaccggggtggcgaagcgggatcgcgagggtggagggtcagtctcggtaatcagacgcaaggcggcagcagcggccgagacggaccggatacgagtacgagcttgagcttcatggctgtgatgaggttgtggatggctggtcaagagaaggtgggtggcggcggggaggtcgctgctttgccagccagcgtctcatatcatccgctgctgctgcggacgacctcctgccaagagacgtcgtcgctcaagtgctctcttcgctcagaccgtcactcgacgcaggagaggaccatgcagagagggtaaagaaggggttcgtgcgtgttcccagagaaattacaacatgaatgggcgatgcaaaggaaaccctgggctgtgccccggggtctaaggatggtgcgggccagaggtcgtcgaggtcctcggctcgaccgagagcgacttacggtagaggttctcgatcgaggtcgaatccttctcggcgaagacctttgagagaaagatctggacctcgggcacctcggcgagggcaaacggcgcctggaagcgccggacgtcgccaacgatgcgccagaggccggtgtacttggcgaggttgatgagctgcttgtcgggcgcgaggggcgaccgccgtgtgtttgggttgccgtcgttgcaaaaggtgatgtccgagaggacgatgccgaggaacggcagggccggcggaccggtcgtacggagccgggcccggtactgcggacgagcgtgtggagcaggggcaagacggtcagtcgccgcggccatcatcagcttgagaccaggactgacgttggcgtgattgcgagacgagtcgaagaggtccctgaggcccgcgatcgcgagcttcgtcttgctcgagagggcctgcataagtcgcgcagggagcatcagcgacctctcgtccgcgtcgaaaggtgggcgaggagactgacctcccaggtctttttcaagcgcgtgatgctcgagccgttgagcgagccgacgacggcaaaggccgcgctaaagttgcggacgtccaggaggcggttctgagagcgcaaaagagggcggtcaggcccacaaggattgaaggaagccccttcgccagcacgcacggcaagcttgataaagaacttgagggcggccgcgcgcttcttgacgtcgcgctcagtcaggatcgtgtctgacacgagactcatcctggcaggaagcgcacgagtgtcagccgtcagatccgacacaccgaaccaaagcaggcgggcgacgcacagctgggtgttgaagtggctcatagccttgagcgaggggctcgaccgacgcatcgactcgacaacctcgtgcggtttgacggcggcaaacagcttggcctccatgaccgtaatctgccgggcgagctcgagcggatcaaagtcggtcaccgcgaccgccgcctgcgggtttcgaagcgcctggaagaggccgcgtgcgatctggggcgtcggcggaagcgtcgtgaggggtgctccgccgctccgtcgcggagtgccagtcgccagacgatccgacgactgcgtcctgtgaagtgacgagcccgtccgaagctcgggcgagccgggctgggaccggagcctgatggcgtgcagcagccgaggcgcgaccgaaggcaaagcgtcgcgcagtgggccctgagcaaacgcctcgagcgacggcagagcggcagcgtcgatgtcggcccgccagtgggcgtcgagccagagcttgaggaagccaaagattcggatacggaccggcgccgccttgttctccatccagagaacgtactcttgcggctggatcgttacgccagcgggaccgttcatccggaagcgactggcgaggacgccgatgagctcggccggcgtcgtgaagagccggaagcagaggaaaaacatgtcgaggagcgctgggtcgacgatcgacgtgtcgtgcggcgtcagcttctcgacgagcgccgggagcgaggcgccgatcagactgccgtcggagccgagtgcgagctcggtcggatcgtagtcatgcccgaggagccagagccggccgtcggtcgaggcgggccgagcaccagggagcgcaaacggcgggttcgacagctggagaggcggcttgggactgctcgctagcgtcgtcgcccgcgaccgccgaggcagaccggtcggcgtcgagaccggcgtgagctcgagcatcggcgtcttgagttcctcggcggttaccggaagctcgagcgactcgaccgaggagcgtcgcacgagcgccggcgggccgccgaggtcgtctatcgagctgcgcggtgacggcaacgttgcctctgtgctgaccgtctgcgtcgaatgcgacagcgagcctgataggtcgagacgagtgtcagcagcgagcaccaatgtcgagatgaaggtaagagaaactcgccctctgcgtcaacagactcggccccattgatggatgacggccaggagacggccgagtgccgccggtcgttgggcagaacgatggcttcgctgccaaagccgtcatcagaagcatcgtctggctcgttatcgggccagattggcagcgtcgcacgaatggtaaggtcctcgcccgactcgcatgggacagggctcgacagcgagagcgagtcgatcgaccatcggtcggcgaccatgccgcgcgggatcgcaccccttgctgcactgaccgcccgagacttctcgagctggttgcggagccggacgagacctgcgccccgctgcgccaacgccacgacgtcttccggttgttcttcagtagccgatgccgaggcagatttgtcggccgatgaggcgagctcggcgaccgcctttgcgcaagaggcagcagttcggagcgtgctcgtcgcgcccccgaggagccggatccggcaatcgttcccggaggccgtcagcgacccggcgcgcaaagattcgccgagctcatcggcggcctcgacaaggctgctgcaggcagcacagagtgcggcacgggccgtctcgagttgctcccgcgccggcgcttcagccagacgagggcatagacggtcgacgacggcgacaatgcgcaggacgcgctgcaggcactcgtgcgcgacttcgagcaggtgggcgacgacggccgtctcttcggcgccggcaggcgcgtacacttggccgataaaggccgagatgatgacgagaagttcctcgtgcgccgtcttgacttcggcgacgccgtcctcgacggccgcggtgggcgcggcatgctctgctccgacgaccggctgcgcaggaggaacttgatcgagcacttccatcagacgccgcccgctggtggtgccgtgggcaaagatcggctcgcggcgcggtacggaagcgagaggggtccgttccgggtcgattcttggggctgctgaccgagcgtcggacatcgctaggctgccagcgtcctcgtccgagttgtcggcgccgttagacggccggtcaggcaggacgacgccgttctcgacggcaatggagaggaaggcgcggacgccagcgagcaaccgcctcgccatcgacagcatcttctccatctcgtcggctcgagagtcgccctctgagagcgtgttggccgaggccaagcgcgactggctgacaagctttgagagatcggccaggatcgtcttgcgttcgcgtgcgagggccggatgcagtctgagcagcggcgagtcctttggcaggcagtcggtcgccgataagacggaccggacagaggagatgacacaggccgtcgaggggttgaagtgctgcaggcgggaaattgtggtcgagagagtgtgagcggaaagtaggcgtggcagggagcctgaggtaactcaccgagatgcggtcggcggcaacagcgctatgcagcaatgagactgcggtcgtgatcgactcaaggattgcgcccgtgcccctcgttgagctcaaggaggcgactcgcgagcctggcgggcggggcggtgtccgcacgtcagtcggccggcgattcgctcgaggtggcgaggtgcgctcgtcggtcgagcgccgccggcgcgtcgtcgactgccgactggaaggccgggaggggtccagctcgagcattgtagtttgcgaggacggtgacggccccgcggacgcttccgaggccgacgaggtcaggctcgaggcgccagacggccgcctgttccagtcggtgcctgcgctcgacgagtcggtcgtcatcgtcgacgcatacgagctccggcgggtgatgctggagctcatcgggccgtcgagcgagaggacatagttgctcgggaaccaggcctggtggccctcgagctcgccgttccaccagcccgaggcgtctttggtgaggacccggatgagctggcccttgcggaaggacaggtacgtcggatcctcggggtgcacaaagtcgtaggcggcctgcacaaaatcaggcggcaggagggctggtccgtcgtccgacgacaggcgacggtcgggcgacgaggctcccgacgagcggcgctcagtcttggggcgaccgccagacgacgacgagctcgcggacgacgaccgccttgagctcgcttccggcggcgttgtcgcgccggtcgacctctggtctccgccggcaacgcggcgggaggaggtcgggggagaggtcgtcaccgacttggacccgctggcgactggcgaggacgctgctgagagcaaccgctgctgctgcagaggcgtcgagggcctgctcggcgtccgagccttggccgtcggtatgcgggaggctggcatcggagccttcgagaggctgctcttgaagctgacaggcggcctccgagctgtatcgagctagaccctgtagcagtcgcagagccctcggtcagcctcgcatatcgggtgcgtcggcagaacgagcaggacggacagaacgttcgaggtcaagagcgagtagcggacagacctcggcagaggaccggcggttgcagggtgaccgatgctgcctcggcaggagcgagctagagcggggcgggagctgttgacgagaggtcaagcagcggctgcaagcgagagggagttgcctcggctcagtgaacgagcgcttcttcggttcggcgcagacgtgcttcgctcgggcgacagcagcaggtctcgtcaaagggggatgagcggtgcgtggtggggggacgagacgcgtcaagcggtcgagccgtctggcaagaagagcacgcgcgccaacgaccgggatccgatcgcttccggttccccgctacgaggaagtgggtgtcggcagccgagcggcgtgccgccgtcgtggcttgtgccgatggcgagcaagaggctcactccgactcagagatgcggaagggacgtacgtacagcagaccggaacaggatacgtagagagaccggacgaggacgcttcgctccgctctgcgacgactcggcaggctacgggcagcggcagactcggtcgcaccggaggctcgggcacgagtggagaaggccgtccgagcaggcggcaccgaaggagcgcgtgagcgggaccaggcgagcgggagcaggatcgaccagctccttgaacgctccgtcggctgtgtctgcttggacgggcggcacttcgtgggccggcgggggggcgaggggggaggcaaagacggtggcagacgcgtcagttggagggcgatgacgagcctgcgagctgttctcgcaaaggtggccgacctccttcggctcgcctcgtctaaggcggggcgaggcaggcgaagaggaagcaagccagcagcccttcggcagcacgacggtgggtaacggcgactcctcgagcgagactgctgctcgtcgcaaggcggcccgagctgtgggtcgaactgagggcggggagagactcaccacggcgaggcgggcaatgaccgagggaccggcacgactggcgaacagtgttgctcagcagcggtcgcgttcgtcaggaggggaaggagggcgagaggaggcgactcgtcgacggcccggctgcgcagcaggtcagctcgccttgccttgtcctcgtatgccagcgtcgccagtatggggcttgcgcaaaaggctcaattcttgcaggacctgccgcgtggaattattaccataatggatcatgatcgcaggaagaagggactcgtacaaaagggaagggacagaggcagagaagaagaacgaggtcgagtcgagtcgaggggaggggccggtcagatgtggacgccgacgtggtggttgaggttgaggttgccgtgtggcttgtgcaggaaggggatctcgctgcggtcgacgtgagtctccgccggcgcttggaccttctcggtcagggtgatgaagtggaaggccgtctcggtcacagtctcgcggacaaagacggtccggtcgggaggagcctcaaagagctgctcctcctcaaactcgtcgccggcctcgtcgataccgcgggcgacgaccctggccgatgaggtcgcgaccgccgtcgtccgccggatggctgccgacgacgaggccagcttgaccgacgacgaagctggcttgaccgacgaagaggccggattgaccgaagacgacgcaggcttggccgaggacgagacgggggctgcaaaagcggctgccccgcgggtaaagatattcatcgttcctccgccgccacacatagtggccgggttggccgcgcctagtcgaggaatgaagggacgaccatggacgttagtaagcatggccaagaagacggcaacaggagcgagggcagcttacagggaacgttgcagttgttctcggtgatcttgttgccccggatcgtgttgccgcacatgcactgggtgtcgaaagagcagagaggaagattagctttgtcggtcgagggttgagctggaggagcctacgcacctggtagccgtactcgacggcggcatacttgaagccagcggcatcgcactgagccatgcaaaactccggctcgttctgccagctctcgactgtaagagcgaacgataccagaggctcagcgagaagcccagcgtccagacggcagagcagcgacttgacgacgtactgtagggcgcgccgagcatgcggttgtcgtcgtagtagcagccgacgtacgaccagtccttcttccaggccatctcagcgacagggtcggcctggtagcgaaggtcggtctgcgctccgttggcccaattgtagtcgacgttatactgcgcgggacggaggttaggcttgggatacggaggtcgacgggcccgatcgagcttcacgcacgtagggcgggtcaaagtcgggattggccgcattgttcttctcgttctgcatccagtagtgcggattcttggcgcccttgacgcagatcttgggcgcgcccttgcacttgcgggcgagacgtggtgtcgggtagagcgtcgtcgaagtcgccccaatgaccctcgccttgaagggcgtcatgtacatttgcttcgagtagccaccgtagtctccggcctcgtgaatccagagccagaatgctgtgcgcaaggtcaagagtacatgcagtcagtcgctgctgcaacaaccccttggcagaagctgaaggcctgcgactcaccatgacagcctcctgccgggctgtcgcagtcacaaccgtggctcgtgtcaacagttgagcgaggcgagagagagaggagcgactgtcgctcaccaagccggcaggtcagcagggaagctaaagtcgaccttggcgtagaagggctgcgaggcgtgccagggcggtcagatatggccgtcttgctactcccgctatcaaggtctcttcctcacgcacgcacgaccggttcgtcgagacgacaatcaggtcggaaggcacgatctaaatggggtcgagtaggtcaggcgactgagggctgggacgctcgcgaccaaatgttgcgtaccgtcgccgggtccgacttccaggccatggcgatcgcgcagccttttgtatggtccgtcggcggcttgtcaaaggtgtctgccgtgtggacatctatcgcgggacgggttcatcagcgcatggacggcgagcaagagattgctgacagcgccactgatacgcactgacgttcgacccgcagacatactttacgtccttggccgcatctccgagctgcacggaggtcccggcctggcgttcggtgaagcaagctgacagaggtaagcgatcgatgcgagacgatggccgggcccgcggcgtctccctcaccttgttacagttgacttcggcagtgatctttcccccggcgggaaagtcgaagaatttgtcggccgctggcggctggtccattgctctgcggggtagtggagaaatcagggtcagaggatgtgctgttaagttaaaaacaggggtcaaagacgcacccgtggaaccaccagccgacgcctccccttcctggaccaaaatcttgctgctgaagcggactgcaaggcggagcggatcacgagaagaggtccaaggagagcaagtcagcacactggctgttgaaggctggaggctatggccctcctcaacaggcagcttaaaggcgagcgactgacacgcaagggtacgacgtgtcaatgcacttgttgttgatgccgttgccgccgtcgcagagcccgtacatcgattcgctccacagtgcgacgtgcgcgttgatcatcgctggcaagacaaggctgaacgtcccaaacagcagcatcgtcgagtgggcgaccatgtcggcgcggcgggtgttcgaggctactgcgggtccggcgacgcgggagggtaacctgtggaggtggagtccaggagagctgttgcggcggggaatacaagaaaggcgagcgaaggcttgggaatgcggcccggcggatgagagggagagggagggaagggacgaggtgagcaaggcgagacgggactttcagctcagctcccagcctttgaggacgagagcaagggcgcccgacaggcgctccgtcttcgtaacccacgagcggcagaagagagggtctcaggcccccaaccctccgatccttggaaagttggcgggcccaagttgctggagacgccaaaggaggtcaggaagggatccgtcagaagccgggctcgtcccctgggctgagctcgacagccttcgcccggcggcgccgtgggcggccgacctgaaggcacgcaagcgagcgtcccggcttggcctgccttatcgggaattggatgagcgcgattaacggctccgcttccaggacggcgatgagaggggtgcgagttcggatggacgagggctggaagctcgtcggaggtgtgccgagactggcggcgagccgcgcagcaggacggcagagacaagccggccggcggtctccctccgacagcctgctgatcgaaactctcctctgacaggcagcctttctcgcagcagtatctcctctcgctcaggtcaggacagcactcatgcgagtccattcacatagaggccatgatggcgcgcttcagagcccgcagccgggccttgcgctcgtcgccctcggcgtccgaaacaaagagcgggaggagcgcattgttgacaaactcctcgatctgaagcgccgggaagcgcgagacggaccgagggccgtagccagactgcgaccgcgaccagtcctcgagcctgtcaagaggtgaaaggtgtgtcagcgcgcgtgatgttggtgacggcgccgcaagcttcaaggggcgacccaccactttgagagcaggaccccgatgtcgttggcgaggaacctcgcgccctcgattgagtcccaaggctcgtcctggaagtgtagagcacggtcaagttagcagaaaacggcagaggagcgcgcgggttctgggtgcaagcgggccgcaccttctcgtcaaacgtcgcaaagaagacgtcaaagatgcgctcccagtcgacgccggcctgacgaagggcaagcggcacccagccggccgagctgctcgtcgcccgctggtcccaagcaaaggcctcgagccggcgggcgagaaactcgagcgggaaggccgtttctgaaggatagaaacgccggccgaggtcggccaccttggccgcgatgacgggcacgcacgcctcgcctgacgacgcgcagactgcacggacgatcaacgtcagtgaaagaggcccgacaggcgacagcaggcactggccgacgtactcttgcggatgatggcgttccacatctcgctgacgaggtcggggtcgcggtggtccgacgtgtgcaggatgagaagcgtggcttcgagcagctcgtacggctgcgcaaagtcgaggtagagctggcagatcggagagcttcagtcagtagccagggctcacgtagcgagtagcagcgaactatggcaccggacggacctcggagatggtgaggagccgctggttgagttgccggacgagctcggtccgcaggtcgtcggccaactcatcgctctcgtagacagtccggcagatctcaatctggacctgggcgacatcgagcttctcctcgatgtcggttcggaactcgactgacatggcgccgtcgtgcgccgacgacgacgatttggcattggcgacggcgagcgtcaggtactcgagccgctgcgggaggggaagctcgagcctgggcagagcggagcgacccacatcagccgagcgtccaatccgtgtcaggacggagaggacgcactctgtcgactgcgcgaggttggcctggacgacggccgcctgggcgtagtggccattccggacgtagtactgccacaagagctcggcccgcgagtggctgagcggctcgctcgacaggtactgttcgatgaacggcgtccgaatctgagcagcagtagcgtcagctacggcgtgagcgtttcggatgcgagcagagccggagacgcacctcgagcagctggtctgtcaggcggcgctcggccagccagtcgtacaagctgtgatggaagagcgggtccgtcgacgacagcgcctgattgtacgcgtttgctcgcagcgtctcggcgtcgttaccgaggcctgagcagcaggagcgcactcgaagcgatcagcgatcggtcactgattgggtggaaacgaaaagtcacacaccagtcgacttcggctgtcggccggccgactcgtcatcgagcagccggtcaaaggcaagtagcgtctcgaagacacactcgtagcactgctgccggcgctcgtaagcggcttggcgagggtcgccctggggcgaaccgtcctcgaggaactcgaccccgaggccggccgcatcccactcctgcgcgcacctcagcggcagctcaattgcgcctgcgcgacgaggtcaaggggaggttcgactgatcagcaggctgtttctcggccatccgacggacaggaaggggagctgcgcgacgcaccggtcggaaactggagcgagcggtactcttcgcaggcatccttcagctgctgaagcgaaaggtgggcggtgcccttgacgaagagcctggagacgggatcgagtcagcaaaggtcagcctctgtcggcagacgtccttcgcgcggcgcatgagcgacagacgcaccgcaagctctcacgcaggcactcgttgcgctcgtgcggatcgcgcgactccttggccttgcggatgccctcgagcgccttgaagaggacgacgtcgtcggtccggcagaaggagccgcagcgctgctgaaggacgtcgctgatggcgtcgatcgacgtctgctgactgatctgctggttcatgacggcgttgacaaccgagcgcgcgacctcgcgacccttggccgtcgtcaggagatcctcgtatgtcaggttgagcatcgactgctggagctcggatgagcatctgaaggttgggtgcgacacgaggaaagtcagtcgcgtcgcgaggtcggactcaggcagaggcaggaccgactgggcaaggatctcgggcaacttgtagtcgatcaggagcaggatgaacgagacggcctcgatcgcctggacgactaggccaacgagagcagcgagcgacgactgctcaaccttccaggcctgggcttcgctcgagcgctcgccggcggcctggtcgacagccgggccggtcgtgaacagttggatgttgctggagggagatcaacgacgcagacgagcgggtcagcacagcgtgagggcgacacagcaatagagagcgacgcaccagtcgaggaacgtcttgagcgcagtcagttcgcgctgaacggtgacgagcgtcggctcgctgacgttgcttgtctgcccgccgctgacgagctgggccgtcacgcgctgaccccaaagcggccgcagtgcacgtgcaagcacgcggacaagagcctcgtgccggcccgagaagaacatctggctcgtcgtctggccgagctggccgtagccgcgctcgatccggacgggccgacctccaaactcgtaaaagagccgcttagcggcgagcgaggcgtcggccgatgctggctggccgagcgacgacgtcagccgctgcgaggccgacgtctgcgacgcgagcgcggcatcggcgcccgaagcgagagcgaggcagagcgcgcaggcctcgtcgcggccgtacgaggagaagaaagcggcgacctcgccctggctgccgccgccgctggcctcgaggatcgcccggaggacgtcagccggcgtgcgcttctcgatgacgtgcatcccttcgctcgtcaggacgaggaacgtccgcgggccggcctcggcgctcgctgcaagctcgttgagccggagctcgccccggccgggcacgcggagggacgctggtgttgggtatgtcaggtccgacagcggatggggcacctcggccacccgccaagtctggccctcaatggcaagcgcttggcagagctcgacgagcggcggccggcttggctgctgctgttgctgctgaacggcagacgagctcccgtacgacggcgcggctggcgcctgcgggaccggctgtgagagatagccgagatccgggcaagtaagaaggaggatgtcgacgttgtcggccgccgtcagctgcggcgcaaccatggccccggcgcggacgactgcgcccgacgagatcttgttgaagcggatcggcgctgcagccgactgctgctgctgctgctgctgggcaggcacgagctgctggttccgatagtgctgatcgctcccaaagccgttcgaatacgacggacccgacacggccgatggcgcaccctgctgaccgggcgtgctcgccggcccgtcgagcgtgagattcgtcggcggcaggcgaacgtggatgagctcgaggcccgttggcgggcccgaactgtttcggatgccgccgtagccgcgacggtaatacgagaagtagagccggacgcctgcgggcgagaggcgaggaacaggtcaacaaggggcgggtcggtgagctgagggttggacgaacccttgctcgtgacggcgaccatctgcgcgccagtgtcgccctcggcccggccgaccgggctgagagacatgatggcaaagctcctcggctcgagcaggccctgcgcgcctggagcgagcatcatcgcactccggccgacgtcggcgacctttgcgatccgcgtcagctggtcggtcgggccgatcatgaagagctcgatgcacgagtttgccgtcagcgcgtagaggacagagcgcgaagggtcgagcgcgaggtcgacaatcttgtcctcggtcttgcccttcagctgaagcggcacaaactgggcaaagatgccgagcccgccgccgccgccggtccagttgacgatgccggtccgcttggtgaaccagccctcgtccgtccggtagatgagctcgtgcaggttaccatccgagccgcacatgaaggtccggcccgagggcgtcgagcagacggccgacatggtgatgccgtcggtcgggatcataaattcggtctcgtggaacgtcaagtcggtcgacttgcgcccggcgacctgggaggtcgagagaccgagcaggtggatcgaccgctccatgcagatgacgagcacgtagggaatgctgtcgacaaagacgcctggagcccagagagaagtcgggtcagctgcatgctctctgcttaacctcaagccgttaattcgtcgagggggcacgcactcgacttggatcgcacgagaccgacgtgaagaatctcgctctgctcttcgtgcgtcataaggtcggcactgggaccgcaacgcaagcagacgagggagggccgggtcagcgtctgcctttgccagccgagaagggctgacagaacgcacgtgtcctggaagtcccagaggaagagcttgttgtcgatcgtcgtccagacgcgatcaatctcggggaagatccccaggatggaccggtggtcgatggctgatggcgaggcggccagacgacaggcagggaggcgagctcgtcagcgtcgtgtcaagcctcgtcgagctcccttgagcgtcgcgacgcacactcaaactcagcgaagagggcgtcggggatcggaaacatcttgcgcttgacgaacgggctgaagttggccgacggcggaaacgtgtaggccgaggacgacgtccctgcgaggcaaagtgtcgttcgtcgagcaagctcgtcagcggggcgcaacgaggaggacagacatgaccgatcgccaccacgagtgaagatcggcctttctcctagctgcttcctgacaagctgcagagcatagatgggagaggaacgcaccttgcaagccgtcgccgagctcgccgacgagcaaggcgtcgcgcccgagccggtcgctgacgaccttcgccgcgcgctcgagcgggccgtacgtcgggtcttcgtgctcgccctgctgctgctgctgctggaccgacgttgaggctcctgccgatgaggcaaagccaacggccgagctgctcgacatggccggcagcgaagggtagagctgctgctgctgctgctgcgacgaggaagcggcgccctgctggccgccgtacgggctgtgcgattggcccggcaggcgggggcgagaggcctgcatcgggcgcgaggagggcgagggagggagaagaaagaggagcgcgcgatatgcgtgctgttgctattccctgcgagaagagtgaagtcgggagacgtagtgtcgctggcagggctgagctgctggcctgcccggccgacgcgtacgatcgacacaggatcggagtttgaatttctcgccgcccgcccagagccagcatgtcgctgccgtgcagggcgtcgaaagaggctgctcgaggtgtaggccggcctccgatcctcccgccagactgctgggcggctcgacgctgctgacgagctgttcccaatagcgggcaattgccatccgcactcgatgactctcccgatgcgggccgtcgcgtcgactgctgctgttagtcatgcgccacggctatcgatctatcaagccgcctcgcgcttcggcttcgtccgtcgtcccgaaccggccgagccgccgacgggcttgtccccttgagcccaagctggctccttcctctcttcctcaaccatcaccaccaaaccttctccatctccctccgcgcaatgtcagccttcccacagtccttcaagtcgaccgtctcgcactggcaggcctcgaatcgtgggctcaactcgctctttggccacggcgccaccgacgccctcccaaaggacgaggtcgacttcctcatcatcggcgccggcgcgaccggtgcgtctcgtctgcctgccctgcctcgaggcggctgtccgctgctgctccagagcggcgctttgagatgcctcgggctgacacgcctgatcgtttcctcgaccaggcgcctcactcgcctaccagctaacgcgacctggcgccgccggccacggcaagacggtcgtcctcgtcgaggccaaggacgtcgcatcgggggccagtacgtcttcctttccttcgaaccttggccagccgttattcagcaatgtactgatcattccgcgctcgacgtgctctcgccagccggccgcaacggaggttcgtctcccgtcgccagctccggcccgtcggcgatccccgcgcctctgaccatcagcctgctgaccgccgtccttcgccgatcttcctctgaacccatcttaggtcactttgccccagcgacggccgcactcttctcgacgctcgtcaagccgctcgccgagggcggcgccggcgtctcggaagatgaggctgtccggatcatcctttcggagcgcgagaactacgagctcgcacaggaggtcgtccgaaaggagaagctcgatgtcgacctggtctgtgctgagcttgcggagggtgcgtgccagtccatcccctttttcctcgcgccgaggccgacaatctcaatgtgtcctccttctacccccagtctatcaggacgaggagcagaaggcctcgtaccgcgcttcgcgcgagaagtacatcgccgcccggcgagcgttcggtctgacgactgaggtcgaggactgctgggtcgacgacccgaaggaggcgatcaaggtgcgcctcaaggaacgggcgatgtggctgagcgtgtgcgtgcggctgaccatgccaaatgttgcagattacgcgcatcaaggacgccgtcggctgtcagcttcgggcggccggctccgtccacccgcacaagctcgcaacccagctgctccagaaggcgctcgcctcgccatcgtcccacttccggctctactcatggacgccggtcaagaacctcaagcaggcgtcgaagggcgagggctgggtcgtcgattgccatgcgcgaggaacgatccgagctaaacaggtcatcctctgcaccaatgctcacacgaagcacgtctttccggaaggttcgccgttcgccaaccagttgcgttgccctcctctgcgttcttcccgtccacgccgctcgtacgcactaaccctcgctccttgtcgcaaccctgccctaccagtatcacccctgtccgcggccactgtgcactcatcacgccgcctctcaactactctggcccgaaagcgcttgcccggacgtacggctctgcttcctgctaccaggtaacgacgccaagcgccggtaacgtcatcggcctcggctgggtcctcagcgtgaagctcgggatcggcaagaagaacgagtttgtcggcttcacggatgatagcgtcgtcctgcccaagatgaaggagtgtacgtccggccgggctgctgaagggcgctgcactcgcctgctgatgcttgcccgtcgtccgctgccctgcagtcctcgctggctggagcaagaacaactttgtcgactggaaggaagacgcacatggcgaggggatgactcgcatttggtcgggtacgtcggccgcctctgtgtcgactaaagaaagtcaaggctgacgcgcctttcctcgtcctccttgccgacaggtattatgggttattcgcgcgacatgctgcccctcgtcggccccgttcctgacaagaatggcctgtgggcagccgtcgcctttcacggtcacggtacgctgccttccgctctagcactttcgtacccatgctgacgccctcctgcttcttctcgcccgcccaggtatgtcgcgcattctctgcgtcacgcgctcgctcgcccagcacatccagaccggcgcatgggacagccgcctgccccgctcgttcgagatcacgaccgagcgcttcgagcgcgcaaagacggcacccaagctgacggatgaccagccggcaacgacggcggcggccaagagcgctggcggggcggccgaggttggcggcacggctgtcggtcccgtcaaggtcaaggccaagctatgaagggccacctgatctatctgtagtcggtttggctcgctcggcagcgcttcccgttgtactcgatgacacttcatacgtctggcgttgcgtgaaggagaagacaagcgccgcatgaggtggtccgaggcgtggccgagcccgaacgagcgacgatcagcatgggccctggaatgacttggtttgtccgagtttaggtggactctgtcacggcgacgacctcttgtctgctggcccggtcgcttagcagctcgtgtcaatcagccggcggctgtcgaccctccgcatccgagcgctgccgagctcggccggttcgccgagcctcgcgaccgcgtcgagccccgactcgacctgactcaacgcatagccgtcgctcactccagcataaaagccggcagtccttcttcgtgctctcgtctctagacagcatcagcccactcgtctttgcagccatgcccgccgccgcctacaagaacgcctacataccgcctgcgccgcccaagctccagcgcgacatccatctttatacgccggccggagactatgacctcaacttttgcctaacaagtcagcctatcggcatcctcaagggtgccggccacgaggttgagcttgagcctctcgtcgtgagttcctcctcttgcctgaatccagctccaggagcagcagcgaccgtctcggagggagccgagggctgactgtcgctcccgcactcccgcattgtctgcagccgagcatgcatgcccaggccctctttgaggccctctcggcctcgccagaccacttcaagtaccagcccggcaccccgtggaaatccctgcaagagacgctcgagtggatcgagacggtcagccgggccgagccggtgcgcagctactctcacggctccgccctgaaccgacgtcgcacagctgctgaacctactcctgcctcgcttctcctggcagacctgcctcttctacatcattcgggacatcaagggacccgagcgcaagattgcagggatgtgcgtcctcggtagagctcgaggcacccattcgacccagccccgactgatcgtgagcgctcgccctcctcaggatgaactacctccggacctcggccgacaacctcatgtcggagctcgtgagtgatcctgttctttactgccttctgctcggccctcgctgaccctgcctcgcgcaccttagggctggatcatgatctttccggaattccagcggtaggtgaagggcctgctggcatgggggactgcacgtttttgcgctgacgttagggtttacttacaccttccggaacttcatctggacccagatcgcatgtcaacactcacgccgcgagtctcatgctcgaccacgccttccgcctgccggccgacggcggctggggtctgcgtcggatgcagtggatgggtacgtgctcctccgtcattccctccgtctaggtactgcacgctgaccctatctcgaccgttcgtcgggcacgctgtagccaacgacctcaacaagcccagcatcgccgccgctcagcggctcggcttcgtcctcgagacgcccatctcgctccgagccgaccgaggccttgctccgggccaggctggctcctatatgggccgggctggcgacccgctcggcctcaagggcgcgcaggtcggccggagcacggctctgctttcaatcaccgctcacgagtgggagaacggcacggccgagcacgtccggtcgcttgtgacgcgctacaagatgtaaaggaagtgacggccggcctccgtggaacgaacgggaggcgcggttgtcggcgcgcaatgcgcgatcattgggacctgacacgttttcccgttccggcgcagtgtgaaagtggaaatgggcatgctaggggtttgcgtgacgtctctagtcgctacagtctttggaaaattggggaagaggggagcttgactctggccggtatggtatcagagggtctcgtttcatgaaggcccttagagcgcctgcgacgtgggcgtgacccaggcagcagggtgcgaaggagggagtctgcaggggccggctgcaggcaaagagaagtgtacaaggagaggattacacgtgtaagagggttaagtgggcggggttgcagcgtccggtgagagaccccgatgatgggcccggtcaggtctgcttttgaaggcgcaacaacagaccggaagatggatgtgctggcttgctggctcggacagaggccagcaagaggagttgaggtgagatggtttgagggaggagggtggggtgacgtggtgagtcaggagggctgtggagcagggcgcggtgcgactgcggaggacgaaacgacgatcgtcagcccgtcgaagcatcgtcggtcgtacgacgctttagacgtacctctcgccgttgttgggaactactgctcgagcagcccgctacttggcgccgtcgacggtcgccggcttgaccttgtcggcggccgacttctttggcggctggactccatctagcgggaggttgatgcccgaaaggatagccctgtggtactcctccatgtcgagcgagtagcgccggagggacatctcgccttcgtcgtcggtcgagtctgaggaatgagatggaggggtgacgaggcgacggtgaaggtgaaggaggggaggggggaaggggtgaaacgtcagcggccgaacactcgcgcgcgcgcctggcgccccgcgcatgaagatgggcgcggtcccggagggctgaaagggagccgacgcaccctcggtcgagcctctacggcgatccaggatgggcgagtcgtcgccgagcgaggcgcctggacagagcgaaagcatgctggtcagtctctgggcagagcttgaggcgagaagccggtggacgccagctccaaggtcgaacgagggcatcgctccggaggcaacgcggggcgtgagaacacgtaccggcaagcttgtcagccaggaagtcggtttggccgggcgactggctgatgacggccgggccagggctgctgaggccgacggtccgcgagtgagcgtcgagcgaggaagactcggtcgaggtggacatctcggcggcttgatgacgaggcggcgaggaagaggctggcggcggcggagttttggctcgcggcggcggcggcgcgggctggtgctcggtaaaaggcggcgtcgtgggcgggtgtttgcttggggataccgagagacgagaggcgaagacgacgagattggatgtgttgtagaggaaggtggtggtggtgtaaaggttgtcgagagcaaggggcaacagaaggggcgacgacgccgacgacgaggagcaatgcgttggcgcggctggtggtgacgttggagtttggttcgaccgccgcatcatccttcactgcctgtcgtccctccgcccactcctcaacccctggtcccggtcgagcaagcgagacgggatccgtcgactggtcgccgggggcgccaagcagtcaagtagagcgagacgagagctcccgtcgcgacgccgccgaggccgacgctctgtatcgtgcagcagacgctcacccgcgctcggctcggaggccgccgccgtcgctccgccagcccaagtcagccagcagctccggtcggccaatctcccctgccgaacctcggtcctgctgggtgctcgtgctcggagtctgttagatccgggccagctcgctcggccgtcaacaagcaggcaacatgcttcgacctacgctcgctcactctgctgtgctgctctcagcccagcctcccttcgccccaacgcccctccgaagccccgcatccgtcaccacgtccgtcgttgcgacccaccgcgcttctcctttcgccaacaccaccgcgcgcatcaccctcttgccaaacgatgggcggcgctcactcgctcaccgcacctcttccgtcgacgccggcctttgcgtaagttcctggtcagcccgggcgcatctcctgcttgacagccgactcgcaggcaccgccgagcagacgacagcaactcaccgtcctctagcaaggccgacccaaccccaacggcatacaaccagtctgtcgtcacaagttgcgcctcgacagcttgtcggacggaccgcagccccttccttgggcccggcgaccgatggccatcgcgaagaacccgcctctcgaccgtctccgccgcgaacgacacgccgacgctcgcccgccggccgaccatgctcgctgagctcgcccgatggccagatcagcgagacgacgagcaccttgggtgccgctgctcatcgtccgacgccctgggcctcacaacccggggcgcgccgtcagcccggtcaatgctcgggtcgcacagaccgacctaaactcgatactaggccagttgccaggcgatggacggccgacgacgcgcagccttactcggagcaacctaggcgatcgttcgatgcgctctgctcgtcggcctgtcgcgcggtgaccggcctgccctggtcgtatgactgctcctctcagaggcctcaagcatcctcggttgccgctcgcttgaaatggcctcgactctctcccacacaagccggcgctgggcgaagtaacctgcttgaggtcagacgagcgtacgcgcgcaggaccgtctgctcctctcgaccgtcgtccgcccgctggtctgtccaatggcccgggcgacggcttgctgacccctctcgctgacagaccgggggacgatcccctcgcgtgaacgagaaggatcgtctggtcgactctttgaatgaacgcgatgctatcgcaagccactcgagctagctcgacgaggctcgacgacgagattcgagatggctgctgcgcacgtcatcctctcccatctccgccctggcctcgtcctcgtcctctcgctccctttcaccacccaccctcccctgctctactcactacgatggcaccagtctcgactctccagctcttgctggccttcctcccggtcgtcgccttcgccgctccgcccggcccgcccgtcatccgctcgcctcgcacgtaccccgctgccttcttcgcccgggacggcggcggtggcggcagcaagacggacggctcagccgtcgtcgtcgtcggtctcagcaacggctcgctcggcgacaacatcacgacgaccgggtacgcgcccgagcgtgtcgcctgcgccaacgggaccgtctttgtccggccggcatcggatgggtgcgtgaccgatcgctctgcctgctctcgcgcctctcgccagagaccttgattcgctcctctcctttcttgccttcccctagcattaacgaagacgagcgcgcctgggttgctgcccggctcgcctctgacccgtttggcgcctacctgtcctcgatcaacctaacggtcgccgacctcaacctgccggccctcaacgactctgcctcctcgaccgcctcaaacggatcgttctcgtcgaaccagacgtcggccgcgcctgtcatcggccttgccttcagcggcggcggcttgcgagcccaggtctcgggtggcggtcagctgtacggccttgacccgcgcaatgccgaggccagggcggcagggacagccttcctcccggcggtcgcatacatcgccggcctctcaggaggctcatggctgacggcttcggtcgccgcccacgcgcccgagaatgtctcgacgctcgagctcgcccagaacaactggaacctcagccagaacctcgtcaccgacgcaccccagcctggtctcgtcaactcggtcgactactttaccgagctcacgcaggccgtcagcgccaaagccgacgctagcttccccatcgggatcactgactactgggtgggtatccctgctctcttgctcattggtctcggcatgctggcagctgacagacagcctcctcggctctctcgccatcgcagggcctcgccgtcggcgcccacctcttcccgcctgagtatgtcgtcggcaccggccgtcctaatctgaccatgggcgacattgccggcctctctgccaacagcaccccgtcagtcgcttctcgtcaggccctatcgcgccgacatgcatgtatgcgcgcgatcgctgaaggatctcgtctgcctcacccaggtaccccatcatcctcaccgtcgagcgctccccgggccagcaactcagccgttggctcgaggacggctcaatctacgagtggacgccgcatcagttcgggagctggggcttcggcggcggcttcggcaaccagtcgctctacaatggcgcctttactccgaccaagtgcgtccaattcggtctgcttttgcgtatgctgtccctcgactgacgtccactggttactctcgtgccttgcgcagatacctcggaacctcgctccagaacggccggcccaacatcaccgctgacggcggcgagcagtgcgtccacggcttcgacaacctcgcctttgtcgtcggatccgcgtctagcatcttcaagtgagttcgtgcttggtcgcgtggcgtcccttcgccttcattccctgaccgagcccccctctacctgcagcaccgcctacgcagcgatcgccaaccaaacgacaggcgtcctcggctcggccatccagtcggtcttgggccgcatctcgaccgccgagctcgacgttgcccgcgttccgaaccccttcgccggctggcggcccgagacgaacccggcggccaacttgacgacgatcaacctcgttgacgccggcctcagtctccagaacgtcccggtcgagccgctgcttgccccagcgcgcaacgtcgataccatcatcgctttcgacaacagtgcggacaccgagttcaactgggtacgtcgatcctcgtgcccttttaaaggtctcacttcgatagctgaccgcttccgctcgaactgccagcccaacggctcctccctcgccgccagccagcgccgcttcgccaatatttcggccgagctcgtccagaagaatttcactgcatcgccgggcccgcttttcctgcccaagatgcccacctctgccaacgcgttcgtcaccggcggcctgaacagccggcccgtcttcttcggctgctcgtcgaacccgacgccgagtgcgcgcgacatggaggcgccgctcgtcgtcctcatcaacaattacccgttctcggcccactcgaacgtctcaacgtttgacctcgagctcagccaaaaccagacggacgagattctccttaacggcgtccggaccgtcacgcttaacggcacgctcgccggcaactggtcctcggcccttgcgtgcgccctcgccgaccgggccgtcttccgcgccggcaataaccgttcaacgctctgcaccgaactctttgcgacctggtgctgggacggatcgagcaactcgacgaacgtgaccgagtcatacgcgccgatggtcggctctgtcccgcccttcctcgccgacctcggcgtctcgccttcgcccgccgccggctacgaggccaactcgaccgcgaccgccatcgcccgccgcatctgagcgttcgattgagggttgcgacgacgcccgaccattcgccaccgacgaccagactccgcagaaccgttgtcggccatgcccgcctccagccgcttctggatccttctcgcagctcctacctttcacaaccaacatgacatgccttctctgctttcgtgcccgaactggctatgccactctggtgagaagttctgtgaataagcaattgcaaagcagacagacggtggaaagccgccgacatgacgttcgttacggaagagggtcgtgaagtcgtgagagggttaccgccgctagggcgaggggacgcaagagacgcgatcgggaaaggcggatcggaagagacgagtccaaagcaagtccaaggaaggcacggcgaggagggtccggacataaggggtaggaggtcgatgcagagtgcgcagtcggaactagggccgcccatcagctccggcggccgcctctcgactggccaccgatgagaatctggccgcggcccttgccctcaaggctaccggcgccgcggccctcgccagccgagccctggctgccgctcgcgctgctagccttcccagggacaccggcgccgccgctccagctgcggccctcgcgcatgacggccgtgccgccctgaccaaagtcccaccagccggtgttggagccatcgaccggctcgtggtgcgagagcgagggggtgttgaggacgacgttggcccacagccggcgccggtccgacgtcgacgggccagagggaggcgagccgacggggttcgacgaagcgaccgggacaggtcgcggcgggagagcatgagcgcgcgtgtaaaagggcgactgagtttggttatcggctgcgtcagcaactgcgcgggggaagcggtggagcgcagagaggtaattcgcacttctggcgacgagatcagtgccgagagcttgagcgacggcgggatcggcgtgtcgttcgtcttgcgcccagtgccgcgatgaggatgcatgagcgacgtcggattgttgcgcttctttcgcgccgacttggcggcggcggacgaagcggcggctgcgagcgaatagcaacttgtcagcccaggatggaagagaaggaagagacctagaaggaccttcaaccgagggcgcaacatcgacgcctttgcctttgtcgacggagcttgtccggcttgacgccgacgggacggtgacctcggtctctgtcgacgcagctgttccggtggagccgacgcgctgcttgcccttcaagagcgcgccggccgaaagggaagcgtctcccttgagaaagagggacgacgccgatgaggaagggtcggtcgacgaggtcaggccggtcgacgagccgccaccagagccggagccggccgagccgaacccgccggtcgtcgacgtcgagtttttcgagtcgccggagccggagcccgagcccgagccatcgcccgacgagccagacttggagccatcgccgccggacgagtcgccatcttcggcgggcttatcctttttcgaagaccggcgcgaggcggccggcgtcgagttgggtgcgaggttgtcggccgcagtcggcacctgagggctcgaccatgccttggccttgcgcgaggccgggccggcagaggcactcgtgctgctccggcgggagaacgagcccgacgctcgaacccagccgtcggtcgcgtcgcccgccgaggatgcaaacgacgagccagaggcagacgagccaggagatgatccgcgctcgtcggcatgctggacctgctggtggagtgcagcggccgaggccgacgacgtcgccgacggcttgcccttcttcctccgggttgtgcttttggtccgcgatgccggctcagctggacgcgcggcagcgacggtcgcctttcgcgagctagagccagaagcggcgacggcggcgggtgtattggtgttggtcggtggacgcaagttgcttccggagccagcgctcgacgactctgcgttgcggaactggccagaggacgagctcgaggacgagcccgatgagccggtcggcgacgagacgggcaacggccgccgtcggcgaccgaacgcatcggacgatggccccggagacgggacggggcgggcggccgacgttgctcgggacggggccgaccccgttgtcgagttggtcatcgaggtggcgagcgagcggaccctagcaggagggagtcgctggtcgaccctcagaggggatggaggacgctggatggaaggcgcggtgggcctcgcgttggggccggttttctgtgcgggcagagcaacaggaacggttggaaggtgccagaggcaaaggtggagccgcgggtggtggtggtgctgctgcggtcacagagaggctgcctcgggtcgtgacttgtcggttgtcaagacgaggtcggtagaggaaggtggagatgtcacgtgcagctcgaggctcgcaacaggagggcgacccactgtgaagcccctcccctgctggatgcaactgcgagaagggtcgtccgtcgtcctcgatgagagccgggcggcaggcaggcagatcgggcgtcgcgctgccaaacaggttccggcccgcgtcggggggtcccaaggtcgattcaagctgcagcagacgacccagaggcaacgccctcgacgaccgaccatgactgggcgtcggcagggctcgtcgagggcaaaccgtgctctcgagcgaggtcgtgtgttgtcgtgcgctcgagaagcggaaccgacgtcgtctcgtcgatggcagccctattcgacctggcagactcgatcgtgtcttgcgcacgcgacgcccacgtggccggcggccgggtcagcgaactgacttgcaattgcacaagcgcccatcgatgcgctttcgctggacgctcaccaacggccgccgttgagggccgtcaaggacgaaaccagcgctcgcctggcagcttgcgcatagagaggcgaggcttcggagacaggcgggtcgtccctgggttccttggcgcgcggcaacctccgtgcaattgacaggatcggccgcctctgcaggggcgtcgagttgactgttgacggccgtgcgacgccactttgacttccaacggccactcggcgcccagccctctctgtacaagagcgcacttcatgaagagttcagagcagaatttgagcgagtgacttaacaaggcaagaagcatagcagagaaggcggttgtggctgaatggcacgtcgcccggggtggcgtctacgagagctccgcgggacgcgacggccgaaggcttgcggctttgtctcctcgcctccgacctctcagctcccatcctcaaccgacctaccatgacagcaaccctcaacgagactgcagctgcagacaagccgacggctgcgactacggctccagcagcggtcgccaacgctcaggccactcttacaacgccggccgttgcagcggttccctgcccgtcgcccgcggacgacccgcccgtgtccatctcgtcggcctcgctcctcctcctcctggtcggcggcgcccatgtgggtcttgcgcattgcgtagggctcaagatccccgatccgtacccggcagtgttcgcctttggcggctttacctttggtctcgtcgtcgtcaagggcttcttactcgagctcgcttgccggcgtcacctcggcctgaccgagagccgaacgctcgccgtccgccaggtagccgacaatattcacgtcggctggtcgctcattggcctcatcgttatactcgcatgcatcggagagaggggattgacggatcccgagattggcctcggcgcctgcgttgttggttggcttgcgttcatctctttctacaagtgcaactcgagtacgtccctttgtgtctggcgtggctacaggcgcttcgtagctgaatggttgtccgcctgcgctcccagtatactgggacgccagctcagccctgactcggaggatgcaccgctgcgtcaaggctcaagccagcgccgcctcgcacgaggcgcccgtctcgaccgggccgtcgccgaccgccgccagggtcgagtcgagcgagtcgttcgaaaaggcttaggaggtcgctctgcaagatgcgatgacctcttgctcttaagactatcctggacggcgtctccgcttacgattgccggacctgtagactgaacactctgccgaggcagcggtgttgtcgcggtggcttgcaacaggccaaagagaggctgcctcgggtcgtgacttgtcggttgtcaagacgaggtcggtagaggaagatggagatgtcaggtgcagctcgaggctcgcaacaggagggcgacccactgtgaagcccctcccctgctggatgcaactgcgagaagggtcgtccgtcgtcctcgatgagagccgggcggcaggcaggcagatcgggcgtcgcgctgccaaacaggttccggcccgcgtcggggggtcccaaggtcgattcaagctgcagcagacgacccagaggcaacgccctcgacgaccgaccatgactgggcgtcggcagggctcgtcgagggcaaaccgtgctctcgagcgaggtcgtgtgttgtcgtgcgctcgagaagcggaaccgacgtcgtctcgtcgatggcagccctatttgaccctgcagacggccccctcgaaacaagtggaccgttgagagagttgaggacaggtgcatcttcggccaaggggctctgcctcaacgttgcacttcctgccctgcgactgcctcatccgtccaggccttctgatgtcatcagagcggcgagagttgcgtatcgaactttgctctgccgttcaaggctgcagctttcctgcaattatcgaatttagcttctcagcgacagacgatcagccagggagacgtggcgctcaagtacgtatgcggacgcgacgggccgtgggatctcgagttgcctgcccagagtcccgactcgaaaccacgaccccttcccgcctccctcacttttaactttctcgttcatcctcatgtcgtccacagagcagccggtgtaccaggatgtcgtcgactcgctgccttatgtcgacaacgacctcgaggccatcccgggtgcgtccgccggcgtcgctccctccgagccgaactccaaacgtcattggcccctgcaatcaaccgaccgactttgctaacgtctgcgtccgctttctacatcgtttccaggactgcgagagcaggccgaggcgctcgtctaccaggagctgagcctgtctggaggtgtctacgacgaacacgagcgcctgccggcggcagccgtcaacgaggccgagctgttcaaggtctggctcgccgcctgccagacgtgtcgaatctcatgagcctctgctgatagacctcatcgtactctctgcctgctccagaactcgccggctctttcgtctctgcttgaaaactacccggatcagccggtacgcgttcgactacgtccggcgccggcctcagccgcagctccgactgacgactttgggcttctcctcgactggcatgcagttggcggcgctcgacaagtcgaggtactcgcttccgacgccagcagagggcgaggccgcgagggaagaggactggaaggtggcggccgacaacgcccgggctcagcttgagcacctgcgcatccggtgcgccttgcctcaatctgctcgctcggccttattctgctggctgacccctccgccgctccccttgccctctcaaggcaatccaacctccagctgctctctgaacacggccccaacgcgcacctgatgcacaaccacctcctcgaggccgaggccaagcggctcgagagcgcggtcgaggagctcaaggccgaggtcgttgagatcaaccggcggcgaaagaacgagcaggtccgtccaaagcgtcccacatggtgcggccaaccagagcagaatctgacgctgctcctctcatccgacagacggcggccagccagccgctgaaccgcctgacgaaccagtggaacgagctgatcgggtcgacgctccaggccgagctcgccgtcgccgcactcgagggcgaggtcgagcttttgcgccgaaaggaacaggctacggcgtaggcctcaggggtcgaatcgcatgtgatgtaaccgtacaccctcgggcaagggatcacccgccacagcaacagctcgcgcgtgggctgacttctcacctgcagcgcggcccgcgacgaggcaggtggggcaaagacgagcgccgttgacccgccgtccttgcgtcctccagcatgcgaggcagcagcagtcgacaatgagcgcctcagatggtcgcggcggggcgagtctggccgacgtcgaaggacatgacggacgacataggggacgggggaggcgtagggccggcagcgaagggcgcgatggtcgcaagagggacgtccttcgcctcgacctcgtcacagaccttgcggcgcagaccaaagcagggcagggaaatcctggcattcacggccttgtcagccctgcgcgttggctgacctacgagcctcgcacgactcacgactgacgccgatggtagacgaagacggcgacggcgacacagacgatggccacgccagcgaggatgccgccgacgatgccacctgcgcgatgtacattcaacccggtcagccagcctgaggctcactcttgcgggcctggctctcgcgcctcaccgatgttccccgccgtcaagctgctgctgctctcaggaggttggactggtgcggtgggcgaggctatggccgtcgatggggccgacgatggctctgcgagcgcatcggaggtcgtcctgctcaaggctcaaccggttcagccgctgcgaccttgatttcgaggagcgacttgcactgaccctggtgcccagtccttgctcaaaacaaggagtggcgccgagaatgcggtctgaccttcgagatcctgagaaaaggggcccgacgaggtctctattagtgggcaacgctttgaatggagctgacgatgcacacctcgacccggatgctgattgaggtgccaggctgctgctcgactgtgtaagtggcctcccaggaccagaagcggccgtgaagcgaggagagctgagcaaccggacgctcgtgcccgtcagcgtcacgacaggcggcccagcaaagcgagacctggacgcaccgtgtgcgacaggttgtcggccttgactaatgatagggcaaacggccgccggccaccctcccattggatcggcagagaccggccgtaaacgacgagcgcggggtcctagagataggcggctagagaaatcagcgctcggttgtcgagaccaatactggcacactggtaacgcaccggtgtgacgacagaaattttagcttgagcgtccgccaggccaacgacgaagagcaggccgacgagggtcagcgggagcgagggcatggcagaggtgatggttcagaaaggtgtcaagggcgcgagacgggaggaatttaaggaggtcgggagcagtgcaaggtccaacaagggtgagcgttggcagtcagaaacgggcgtcgccctctttcgccctggacgtcagcagagtgccggagacaccgggagaggacgcggcggaggaaggaggcttgccgaaagggacttaccgtggctgcgcggctgccggccaggcggtcgcgaaggcagcggttcgtgaagggagcatcggcatgtgcagagcaaggagagcagcggcagaggaagttgggagaagcaagagatgacaagggacgagtcggcagacagtcgcagatatgacaacggacgagtcggcgggcagtcgcagagatgactgaagacgatgctacatcgtccggatgcccggccagcgctggtcgtatgctggcggcaggctggcagtctctgtcgagtggctttcatcggctccgataggcaagggaggcagagccccgcgtcgatcgtgcgcatccgagccaacagcgtcctccaggatcttgggcggcagagcagagtacgacgcggccgcgtcgtgcaggcctagagttgcagcgccagggctggctcggtgcgaggccgggaagtagccgtgcgcgctcgtcgtcggcgctattggagccggagtcgtaaaggggttgctaatcgccgtcattggcacgtcgggcgaggcgcggttgccctcttccaggatcgctgcgttcgaccgagccgagcgacgcctggaacgaaacgaaaggatcgaaggacagggtccccatcagcaaggaagatcttcatccgctaccgctgtgaaaggaggacgcacgcgcgccgtcggcggaggcagcaaaagacggcgagggcgaccaatacgccgagaactccgatggttccgagagagatgccgactgaagggcagcgacgacaggcggtcagtccttgtggttcgaatcccagccagcaagcacttatgctcaccgatggcgccggccgatagatagtcgtcgtaagaatcgctgggcagggcagaaatggacatggtgcctggaatggacggcgaggaaggctggaagaggatgaggctggatgcgacgccgagaggtgagagcttccgatgggtgagagcaggacgagcttgggcgaaggaggggctgcgaggtagaaagaaggcgcggctgaggtgatggccagcagtcagcatctgtttcctcggcgccaggtgggagaaggaggcgaacctgtcgagccgggagggattgatggtgggagataaaactggtggtcggaggagaagcaggcgagctataagccggtcgagtttggccttgcaagcgaggtgagtcggatccggagccgttggtgacagagctcagtcagccaggagcgagtggctgcgtcagagcgatggaagacggccagatgacgagggtgccggcctgaagcgccatggccgctcgtccgtcctcatggcgagcagctcgagcttatgccggactgcctgttgctggagctgcagagttgccagacgatgctagacacgcccgtagacgagcggccatgccgatagctcgaccctgcagctcgtcgctggagccggtcgtccccacgcggtcgagaagagagtttggacggtaaggaggcgccggcaatgccgaagcgaggcggacggggcaagcccaaggcgcccacctcgcaggacgacagacgacagcgagtcgatgccggtccgcagtcgagtggtgtcgcttcgtacaggtgacgcctggatacttgaccaccgtcgagtcggagggtgaaggacgagagcatgaggcgcgcaaggcagacgatgacagtgccggtgcttctcggagcggagagccgtcgctgtcccggagtccgcaggttctgcaggcggcggctctccttgctaggccgcgttgtcagcgagctcgtctcgacagtcggtcacgacagagtaaggaagggctcgcgaagtcaagcggcctcccgatgcgtgcgacggcggggcgcagcaacctcgcatcgagacggaccagcagggcaactctacatgcagaatcgaacgagaagcgtgaaggagggcaagtcgagaaggaagtttcaaacggcgagcgcgataacggagacggcgacgggaggactagagaaactaaaggcaggaggggagggagatggccgactgaagacgcgcaggtcgagaggcttgcgctaagcctaccggccggaccacgactggtcgtacgctggcggaaggcggacagtcgaggcttcgaggtcctccgtcgcaggcccattgtcgacctcgacaagaacggcctcgcgctcgagcgcgcgcaggtcggctgacagctctgaagccttggccagccgggcatcagcgccggaagaagaggcaaggcctgtgtaggccatcgcaggcgccgacgagaacccggtttcgacggacgacgagaggcccgaggtcaaagaaggtgccgtggtattcgattcggccgggttggccgatgcggtggccgggctgtcggcgtacgcggcctcggtaacggcagcgggcccggtcgagtgcgaggccgaaaagtaggtctgagagtgggctacaggcgtgacagcggccggcgtcgcaaatggattgacggtcgccgtcagcggcaggtcggacggggtgttgtcgtcatcgtccatcatccacgaggcagacgcagaggtgcgctgactgccggatggattcggtcaggttggtcagcgacgctttttgggacgcaggaaagcggacggagggcttacgcgcgtctccggcgaaggaagaagtagatggcgatgccgactgcgacggcaaggccagcgagcacgccgccgacgatgccgcctgaatgggtaagatggccggtcagtcatcaggtccgcttgtttttcagcggcgcaggtgagcgcaccaatgctgccgctcgaaaggcttggagcggagtcgtcggcggcagtcgtgttggtgaggggtgtactgatgcccagagcagccgaggatgccgatgatgcagaggaacttgatggggcagaagcacggatggagcgcaaggaagatgcagcagaagaagagggacctgctggcgctgacgaagatgatgcagacgatctggcgagagagggatggagagcaggctggtcgtcagttgtcgtgcgcggacgaggcgaggctcgagggacgcacgaggctgaattgccgctcgacaatgccatggaagaagcaggcgtcacgctcgtagaggacgataggctggcttccgtcggcttggcctcgaccggtggcgccatcgaggagaagtaggagaccgaggaggaggatgacaagtcaaagtcgggtctggacgcattgataatcagcacaggcccctgcttcgcgcaagagagagctgcgagcggacctcattacggaagcaacgttcgagtaagcgcgttgaccagcaaaatcctgaaaatgagcctagatgtcagccttccggcgctcctgctcggatggactgcaggggggacgtacgacgacggctaccatcaccgactcgcgcactggcaggtcgacagtccacacgacgctactctggctgccttcgttgaggagcgtcttgagctgcttgccgcaaaggcgaggagacagcgtcagatggcggcgctcgatcaacgagaggcctggcgagaacgtacgatcgatgaggctcccgtgctgccgctcttgaagaccctcacagtgaagggctcgacgccgcccgtccaagagacgagcactggactcccatagtgaagctccggctggccgaggaaggtcctatcagccggccggcgacaagcccttcctcccgaagctgagcccacgcaccagatcattgaatcgaagggtctgggctcgggcgacggagcacacgacggcgagtacgaggagagaagacaggccgaatgacgaacgcatcttgccaaagagaggcgggcggcgggaagggaagccgagccagagctgcgaaaacaggggttggaagaggaagtgtcagcaggaagtgcggttgaccggacgacgagccgagtctctctcgccgtgaagacaacgaagataggcacgcacccttgagagcgagcctcaaaagccagagagggagtagagaagctggtggttgggagttcgagggcaagagcggccttcggagctttggctcgccaaggggagaccgacaggggttccggccgaccccgcgtcccacgcggacgcacgaggtgagtcggccgacagaagcaccgcagcgattcaagtgctagcgagctcgacaaggtacctggcggtatttaagcaggccgaacgagcgtcgacctggatgcgctttcgtcgaccgtcgggaccgttgactgacgacgactgaccgactgcacgcggtcgcacgaaaggagcgacgaccgatacgctgcggtcctcggccgaagcctgcgagggctgaggacgagctctggattatggtgagctgactcggctggctgagctaccttcaggaggtcgagagggttgctggagctggtgacgggtcaggcgggttgaaccgaggccgtcgacgcaggtcgacgtcaggagcgcagcaagggcacgaggcgacgtcgcccatctactcgacgagcctgctgccagactgacgagggctgactatcatgctgcccacgctgggacgaaggcgaggcggctgacgaggggaacgacgctgttgggcgggcccgcctgtcgttcgatcggtgtcgagcagcgcttgtgctgccgtcgttcgacctggctcgccgtcaagagggtcgggtgagctcgggaggcctgctcatcagcccttgccgtctgtgttgctgactgccgggtcgctgcagcaggtgaccgttattggacagagcgttgacgaggctgctgctccatctctgtctctcggcctctgggcccagccgatcggtctcggtcgcgccgcttgaacttcagcccacgcaactcaacgggccgggaaggcgttcctgcaatcctctttgctctgaccagagccacagatcatgcgacgctcgcactccatcctgctacgaggcagccgagcgttcgacctcaaccggctttgatcgaagtggccgtctgcccccttcaactcgtctccgacagctgcacgcacgcgacctgcgctccgatggccgccgcctccttcctcgccagccttcatgtctacatcgtcccggtcaagtacagctcgggcgagctcctgtcacatgaggggaccgtcatcgtccatgggggtctcatcgcgacctcgccgtacgtctgtggcactcggtctcacgcccggccgctcaggctgacgggctgctcccaccgaggtcagcgacggcgcagaagtcatcttgacgaggctgctctctcgacgccggctcgagatgacgctcagctcgaagctcgtcgtacgtcgactcactcgcgtcctacgtctgctagctcagatttcgctcgctcgcctgcaggacgaaaaggtgattttgtcggatcgctggctgcacgactgcgtgacgctggcacgcctgctcgactaccggccttacctgctcccgcgggaccatccgaccgactttgacgtcccgccggcactcgagcaggtgtccgacagccgatcagcttcgcacagcccgctctcatcgcccgaattacagccctatcagaagcgcaaccggacgacgacaccggcaagggctgccggtccaaacgattgcgtcgccacctcgaccgagcctcaaggcttcgactgggctgtcggtccctcctcctcgccgccagcctcgcccgaggcggcggtcgcaaaacttcggctgtcgtcggcgtcaccttccctcctcccctatccgacgctcccttcgccagacgactacacgccctttccccgtgcagcagatcatctgctgcctggccccggcaagccgattgacccggcctctttaccaacgctcgcatgcaagaggccgtcgccgctttactgcatcaaccagcgcctgtgcgaggagctccaggtcatcctcctttggaagcaggtcggcgaggacgatctcggcggcggcgccggcctgactgacaagcacgcactgtcgtacaagcgggccatctcggtcagtctgttgtcttgcgttcggctgcaatatcgctcgctcattcaacctaccatcgacaggcgatcaaggcctacccgacggcgatccagacagcggccgaagctaggaaactgccccaggtcggcaccaaaattagtcagcaggtgcgtgcttccgcccccgtattttcggtcgcaatgaccctgctgaactctgccgctttcgcaggttgccgagttcctgcagactggccgcatagcgcttgcttcgcgcctacggcaggacgcccggctgcattgcctcctcctctttcaaacgctccactcggtcggcccgcacctcgcgcgcgaccttttcgacttgcacggctgccgcgacctcggcgacgttcgcgccaagaggcccagtctcgccctcgaggtcgacttttggggcgagcttcataccaagtcagtgcgcaacgaccccgacccgctcattctgtctgttgctgacggatttcactcgttcagaattccgagggccgaggtcgaggagattgcggcgctcgtccatcgcgagatggagaacatccggtcgggcagccagtacacgatctgcggaggtgcgtcggtcggtgctttgtctcgtcgtctgctcgtcttgacgacgagcgtcctttcgaacgcaggctatcgtcgcggcaagaagatgtcgggcgacgtcgacctggttgtcagtgagtgccgcctggcccttgcgccgttgcctgctctcgctgacccctcgtatcgctcgcagctcatccagataacgaggcttttgttaatcgagacgtactcgacgcgctcattcagcgcctgaccgatctcggtgcgtgcggctgcgcgaacttttagccgaagcgcttcacgagctaatttctgtgcgctccgccaggcgtcgtcctgcacaccgtctcgggcaatcagatcggcgctggcaagcaggtttcgctcgagcagtcgttcgtcgtcctccgccttcccgaggacggccgcgcgcgccgcctccgacggcgggtcgacatcatttttgcgccgtaccgagtttactggacggccgtcctcggctggtcgggcagccagcagtttgagcgagacatccggtgcgcgcgactgcttttctctgcttgccgcttttgaccctgacgacaaaggcctctgcaaccgttctggcagaacgcacgccaatcatcttgacccacctctccgcttcgactcgtctggcatcacccgtctactcgagggccggcatgccgcgcacaacgggccggtcgagtttgacccagccaaggaggaggctggcgtctttgaacgactcggcctgacgccgcttcttccagaagagcgcaacgcagactgctagacggcctggcagacctccatcttttctgttgacattatatcagtaggtctcctcctcgcgttgtcgggcgagtccgcttcgcagaggctgacaatcttcgtctcgtccctcaggtcctattgatttgtatttgctcggctccggtgacgtgcgagcaccatgctgatgacgggctgaccggccgactgaccacacaatgcgcctctggtgccgaacttgccggtcgacaggagcgtgcgggggagcgctgcgcgatgcgggatgtgaagccccttttctttccactccccctgtcgccttcctgcggcagactctcctctcgcccggccctcaagaggaggttttgtcagcctgacgacctcctctttcctgtgagcggcggtgactgatggcagccaggccgttcgcaagagggagaaggcaagcctcccctgtcgtcccttcgacttcgatcgactcgtcaggagggaggggaagacccgcccgcgctggatcgacggtctgtcatcctctcgctcggatcagggaccttttagaagacggacgctcgtcagcgaccgacccctctctcgcttggctcgacgggcggagcaaagtcggcaaacgggcgcgggcgacgccggcggacggagcgagagggcagcgccgccctgcacgcctctcctcccctccgcccaccacccatcctctcgcccacccagcgagctcttgccctcgtcctttcctctctaacgacccctcccgaccgctcctgctcctaaaagtgcggcagctcgcagctcgcagcagcccacctcgttccttccgtcgcttgtgtcggaccccaagcaaacgcctcggctagctggcacgtccttcctgctctggctcgctaaatatccgcatcctgctgaccttcgcactacctctgcctcctcaccctccttctctaagccgacgaagctcttggtctctttgtgccactcgtgcgttgctggcttctcgactcggcaaccttgcgcttcgcctcctctcgcctccacctcttcctccctctcgaatcgaccggcgagcactccatctgctccttctctcgctctctctctctctcatcaaggcttccggtacgtgcatgctgccgactaccccgctcgtgcgcgcgctcgctgacatcggtgtcggctcccttctcgtccggcagatctcgtctccgacctctccctgcccctcctctagcggctcgtgcccttctcgctcccgagcctcatctcgctttagcctcatctcgtgcggtctagcggtccgcccggtcaaacgactctcttcgcctcggtgactggtgcgttactcgtcctcaaccccttgggcaccttttcctgagcaaggcggtgacctcatctcgtcctccgctccagccagacctcgcccggtcatgtcattcccctctcggcggccgacctttgggccgcctccctccgcccagcgctccctcgccgaccgctcgcccgtctcaacgtcgtcctcgttcgaggacgctctgcgccggctcgacctcggcgggcctggctcggacgcctcgcctggcagcggcgactcctcgcctggcagcggcgactcctcgcctgcctcgtctactcctcggtcgataacggcggcgggcggcactcctgacctgaccgagtccgaggcccgtcagtctggcgcctgcggccggctcgcgaacggcggcccagatatcgccatcaaggactcgctcgacgactttctcttcccggcctcgactttcacctcgccgagcttcgctaatgcctcgtacgcgccgacagtgtacgtctagacgccctgcctgcttgctctgccgctctgccgactgacctcgagacaccctgcccctcagccccaagccgagcgacgacttcaccaactcgatcctccaagctccgacgctaccttcgaccgctcgcttcgcgactcccgacttgggccgctatgggcctctggctacctcgtcgctcgcaaacccggccgccgaccgcaagcaggacgagctcagccagccagcgtccgctcgtccagcggagggccatcgcggcgttggcggagcacatggcctccagggcttgcgcatcgtgtcggcaccgcagcgcgacgccttcgagatcgcggccgagcaagggcggatgcgggccagcgtcgcaggccagcaaatctggccgtcgtcgacggacaacttgctgcgtagcatgtcggtgcatccatcttctcctttcaatttaatactcgctgctctgatgctgacgtgttgtaatctgcccttcatctgcaggtcgagcagctcagtcgtctcccgcacgagcagctcgcccggctgatcgacatcgagcgggcccgctgctgtcagccgtccgctagccctccagcaggattgccctggccactttgggcgagcacgccgaccttcacgtccgaggctttctcttcaccgaccatctcgccgtcttctggccaaggaccgcgcgcccggtcacacacctcgcccgcgctcgctgccggccgcttcgacaacctccacctgcgttcctacgacaacgacctcgacgcgcagactacggccgtcatcagctcctactttgacggccacgtctcgcgcccgccagctcgcgagcatctcgccactcatgcgcccactcatgcggtcggccacggtctgcccttgtccaccgccgcggccagctttggcggctcggccggcccgtacttcagcggcgccggccttcttgctcttccgcctcctcgtacgacctctcgcagcccgtcgtcgcccgtctcgcccggcgccggcttctcggtcaagcttgacggcggccgtccttcgacctttgccagcagcccggccagcctccacagcccggcgctgacgcagccgccgccgtcgccccgctttgccggcgcgcactcgccttcgaccaagatctcggcccagagccccgaggtcctcgctcgcctgcaggccatccggctcctccatcccggcgcctacggcactcacccggccccggcttcggcaggcggtgctgctgccgtccgccagacgccgccgcacctcgacctcgccttgcagggccgtggccgggcggcgagcattggcaacggaggcacgagtcctcggtccttcgcctctgcgtctggacacggcctcagcccagccatcatggatccggcgcttcagcagtatctcgcagagcacggcctaccgattgacgcgcccagcccgaccaacaaaaagatccagctatacaagacggagaagtgccgtacgtccttgaccctctcggctcccaccgaccctggctgacactgcgacatgtcgcctatgcaggctcatgggagcgcaacgttgacgctgcgacgcccgaggagcgttgcgtctatggcgccaagtgccaggtcagcccctaagagtctagcctcgctgttcaaacgcagtagctgactgccggcctccatcgcagtacgcgcatggcgagcatgagcttcggccggtcgagcggcaccctaagtacaagactcaggtgcgtctctcggttgctcaagggccaaaacagacagacgtctaatcttcttctgccgcttgtcgctcgtgcctgcgccagatttgcaccctcttctggctgctcggcgagtgcgactttggccgacgctgctgctttctgcacgacgacatcccgtccggcggcattccggagctcggtgagtctaccagcttctcgacctttcatgactggcaacgcggtctaatcaacccgactctatccttaggtgagctgggcacccaggaggctctccgctcgatccttatggcgcgccggtcgctctacaccggcgggccgctcgaccagctcgggcttggtccagcccgagccaactcggcgccagccctgcagctgtcgttcggtccggctgcgctcgcattccctcggtcggaccgcctcgatgccgccgaccgcttcaagttatcgtctcaagccaccttcgctgaccagacgaagcacctcgggcaccggtcatcgcacgacagcttcggctcgacctatccgcgttcgcctgtcacccgcgagtcgtcgccacctttcgaccggcctctcctgcgtcctagggatcggtcagactcgctctcggtcaacatggcccccgtcccagagctgacggccatcccgccgacgctcccggtccggacgccgctctactacgccgaccaaacagcaatggccgcggccggtcaccgccagcgccccgagttcgacaacctctcgaaggctcatcgccgtacggtcgacgccgacgctcacacacgcgccctcgcagccgtccaggccgtccatcggcaaggcgcataccagtcgtcgacggccccggcgccggtccgagacgcagccctcgtccgccagccttggtcgtacggctcaaccggccttcctcagccaacgtctgtcggcgcgatcggcgaccgcggcgcgtccgccaggtacgaggtcggctccaagatcctctggtgatgaggacggccgccttcactcacggctcgaacaagaaaaacacaaccctccggctcgctgcctcttataccccctcctttggaactatcgctcgcgctctgcctttgcacttcacgtatcgtctcccactccgtgcccgcctgcctcttgctgcctccgttgtgttcacaacctcctcggcccgcccgcacctgtcctatagccgtccagcgggcgctcatatcgtcccctttcgcgtctcgccgacgcgcgccaccttcctttacctctgtccctggccgcccctttcccgtcgtcccgtctgttcactgccgccattcacgctcgaggggacgctccccggcgaggtccctcaatctcacctccccccctaggccctctttgctgctgtactttggccttcccgagacgtttgtcctctctcagctcgccccgtcgaaaggtgcgcttttgcgccagatcgagaaggcagcagcgtcggcaatcagcgagccccgcgcgcgcgtcgctaccacttgcccgtttcggggcggcccagcgcgcttcgcattccgatttcagcgataggagtcaggggtgccatgcggccggtaggaggggatcggggaaaaggaggagcagaaaacgacgccgacgacgctttcggccgacgggcgtgcgcgcgcggcgggacggacttgctcgcccgtccctccgaaacgccccgtcgtccctctactttgtccgctgtctcggcgggggcatcacaatggcgatctgacgatcaagacggtgagcccgatggatcgtcaggcagagctctgtgtgcaggtcccttgctagctccctgcggcagtctttccttgcgcagagaccggtctgtcgtggcagagggttcaagatgcctcgacgagcgagcccaagagaatcaggagcatggcgcgacgaccgatgccgatggcgttcgtctcctctgcttgcgggctctgccgcccaggaaggccgagcaaggcgatgcggtctggcgacgagaccagttttcgtatcgggcagcatgaggcgaagggggcagctttgcagcgaggctcggtcgacaggcaggtcctggccgtggggacgtcgtaccctgcgcggctgcggggaatacatcctgcagtaggtgcgagacccgacgccgacgtacctcctcatcctcctgctctcccgccccgtagccccggccgctctcagtctcgcgcttatcacgccgtcgctcgttagcctcgatctactatggtcggcggagggtctttctccgaaaagaaaggggtcaggcccggcctctgctgccctcgacgccgctgccccacctctcttagcacaactagcggcgaaggggagcggaagggtgaccgtcaggcgcctgtggctgaagcaagtggcaggacgtcgaaagcctcgccaggccagagcccagcgaagacctgtcatagaaactcgtgctgccagttgtcacttgcgagagtgagtgctcgttgcttgtgcgacagccatcccttcctgttcagcttccggagtcccaaggcgtgggcccgcgagagtgggtggtccgaagtggccgatcgagcaacgcgaaagtgaccaaacatttctcgactctccttcgacgccacgcgaccccggacgcagggctcgtcggcccgaggcgccgactcccctttcgagccagcttgcggcctcggctggccgcaacgccctgtctggctggccggccggtgacagaaggcgtaccaaaggcgatgctgaagggcctccagcattgctccgactcgctcggggaggaggagctcgttgtttcagggttgcccgaaggtcagggttcgacgagcgcggggcggccggggcgccgggatcaggtcgacgaccgggcttgacggtgagcgcgtagagcgcaaggaggcgccagcccggcgagcgagcagaggcaagagaggccaggaggacgcctctctttcgctcgctcccttctcggccaacgacgacgacgccgacagcctgaaccgacagacgcaggcacgaagccgacccgagcacgcagcctgcccttcttaacaccatccgctcctcagccgccctgtctcctgcgaccgggatcatccgcaggtgcgtgccttggtttgcttcctcgctctctcccccacggccccgagcacactctcgtcgctcgcgaaggaccggcctcgggcaccgtcatctgcttgctgagcactcctcccgtcgtgcagcagccttcctccgtcccatcccagatctcgcccccggcacagacgacactccgccccgcccctgatggaggcaggctcgcacgctcctcgagtcggtccgtcctctcttgctcgctcggctcagtgacgaccgactcaacccccgcacagccctgacgccgagccttttctctccctttgtccgaccgtcacggacgatagccggcggcagtggcagtggcagcggcaacagcagcagcagcaatggagcgaccgctcttgccgacggttcaaacggcgtggtggctggccgaacccggcccaatctgacctacgtctgttctcgccggctgctgtgtcgaccgtccgagtcacctcagagctgacctcgactgtccatccactccaggtcggactcatccgggaagctatcgtcgaggttggtctctcgccgtcgcctgtggtcttgtgcagccagtctagagctgacgcgtcgtcttgatggctggatcttgatctaggcgcccgagcagcgactctatctgcgcgaggtccgcatcgcccgctcatctcctctgtaatcatttatctacgctgaaccctgactcgcatctctctggatccagatctacgaggctatcgcagacaagtacccattctaccgagactcgacgtcgaacacttggaaggtacgtcagcctgcagcgctggcggctcatctatggcccgagagtcgatcctgacccttagactggctcgcagaatgttatccggcactgcctgtccatcacgccggcgttccgcaatctgccaaaggaggctcatcagccgggcaaaggaggtgcgcgcgcttcctctttcatctcgccgctgctgtttactgactgcctctctgactcctttcgcgcctcaggcctgtggacgattgacgactcggtcagtcgtctggagaggcagaagctgctgtcgtcgaagcctcgctgacccgaccgtctctcgccgacagattcctgatgcgtactcgcgcagggtgcgttccgctgtttgacgtcgtcgaccaacgacagcagactgatcaatcagctcgtgcactgccctcctgcagcgcatccgcaagtcagaccactcgaaggcgggcgggtcgacggccggatcttcgtcgagtaagcctcggcgtcgcaacacggtctccgagggtcactcgacgtcgcacgctgcgtcagcgtcgatcgccccgcccccgatgcccgttcgacattcggaaccgtcgctcgcgcctgcggacccgagctggtcgctcgacccgcccggctcggtcggtggcagcggcgaccgctcgagcttcagcgacggtcaccggccgtcggccccgagctggatgagcccgtcgagcacgtactcgtctcggagcggcggcctgttcgaaacgagcccatcctctcattcgaccgacagcaacctcgctccgtcgccttactcgctgccgcactcgattgcgccccagctctcgccctcgaccgacggcaacccgtacgctctcccgcaggccggtcacttcgagccgggcagcaccctcggcggcgcgagctacggcccgccgtactttggactcggcgggagcagcaacttcggcggaggaatgctcccctttgcgcccctccgttcgacacatccgcacctccagcagcagctcttgcatcaaccaccgaagacccagcagcagcagccgtcgcagacgtactcggcgcccatttcgccgcactactcgccgtcactggggccggcttcgcccgcggccggcacgttatcgccgttcggccaacttcagtacccgcagtcgcttcaacaccagctggtcgactcgctcacgcagcagcagcaggccgccatcggcggtgcgcccaacacaagtagcggtgcgagcggctcgtcaacgacggcctcctcgtcgtcgatcaacctgagtgactcagcgccctcccttgggctctcgatcaaccagctccattggcggcagctgccgtcggtcgaggagcagctacagctgcatcagcagcagacgcagcaccttccggcctactcgtggccgccgatcccggccgctcttcatcccgcggcgctgagcgggagcacatactcctccaaccagagctcgacgcccctggagggcagcggttcgaacgagctcatcgcccctccaccgattcttcctcggaaggcggcttctgactggaccggtctccagtcgactgagtgggacgccggcctgcgctactagatcgtcgcgttgaacgaccgctggccctcgacttcagtcatctgctatttttccctctcatctactctcgctctagctctcgcgcttgcagtcatcttgtaccctgtcttcctgctaaagcatgtcagagtctcaaactttcttcctggcaagccggcagcaggacgggcgaggcatgtgatgcagctggctacagagggccctgaaggcgttttggacagtgtgcgagacggcacgagaaatgcgaaagagcgaaggaagcgagaggaagagcaggtgggaagaggatcgttacaaaaaggtctgcgagcggacatgtcgtggatgagtccgagcgagaaaggtgtgagacgcttcgggagaaggctggacattcgagtgatgagggtcggacacacctcgagcaggaaggcgcccaaacggaatcgcagctcctcttggggcagaaagctgctgttcgctgactgcccgagagacgcagcacgccttgagcgtgcaaagaagggaggtcggtcgcccgtgagatgcggcgcctagctggcgctcgcctcacgggctttgcttcagagggtcttcgagcgcgaggcgtccttcgacgaaagtcgacggcggccttcgatcgtcgtgctctcgtcgacttctgcgtctgcaagcaggagccagatgactgcgcgtcagctatcttgccagcaatgaagtcggaaagagtcgggggcagagcgacgtacccggatgagctgctgtgcggtggcgctccatgtcgtgcttgcgcgagaagcccttgggacagccctcaacagtgcaagggaagcgcttgccgccctcgggcgaatgagcgttcatgtgagccttgaggttgaagatgctggagcagcacggtcgaaggtattttcagccgctatcatcgctggtccgtgactcgagagcgctgaggaagacgcaccgcttgaagcctcggccacacgatgggatcgggcagatgaacttcttgtcgggatccatcgcgttgagcgaggcgttccaggcatagtgcgccgctgccgcctcgggcttgatcccggcagggaccgagaaggcgcgactactcgaggcggtcgtcgacatagatgtcgccgccgaagtcgaggccgacgttgacgggccgtgctcgggcggcgacgagtcgtacgaggggggcgattcaaagctaaggaaacgacggtgggtcagaaaagagctcgtccacctgttaagtgccagcacgactgaccacatggtcgcagcgccgaacgaggcctcgggtagggtcgcaagggtcgagccagccgaagcgcgtcggtcgaccagcttcggcgaggaggtcgtcggaggggcaatggatggtgggacgatcgacgtcagaggggtcatcgagccggtcggagggtagccctgatgagtctggctgccgaaagcgttatacggcttctgctgctgctgctgctgctgcgagtgatgctcgaccggtcgacctgcaggatgggcctgatggagcaagggcgacgagaagccggccgacatcatggcgggcgagctgaacacctgctgcgactcggcgagtgaggctgacgcgaactgctggctgaggtggtgctgcatggcccgtgagtagtcgagacgcgagctggccaccggcgccgtgggctgcggcgcgaaggccgcgtagtaagcgcctgggtcgaacagagccgaggtcgacgccgacgggtagccctgcggggcggcgaacgccggcgagacgaacgcgcgctggggctggtcctgctgctggaggtagggcgccgaaccgggcatcgacaacgaagagctggcgaacgatccggccggctggccggcatggtcaccgagggagaaatccgcagcgccagcgccgggaaagaggccggcctgggcagccatatgctcgaccgcccgagctatacgccaggcgggctcgccgtcggcgagctgagattcggagtagccggcgcctgccatgccctgggcgaggtactcggcctcgatccggttgctgaggtagacgatgctggcttccccccggaggtaagcggcgacgccaggcgcgaccgtcgacgaggtgagctggggcggcgagggctggagggcctgctggaggtcggaccggggggcgctttccatgaaatgacggcggaaggttgctgacgggcgggacgacgtcggtgagcggcggaggtggtgctggatggtgagggaaagagctgaggtgggcgttccgggtcccgtaaagcaaggcgagctcggatgaggtcggtcgcgacgccgctcgctcggcctgggctcggccgacacttggcgcgccgcttcgccgcaaaactcgccgtccggcagcatctgcagacgccaaggaccacccctatcctcggcaggcgcctcgtcgctccttctgcccactccacgagctcctggccgagctgccctctacctcctcaccctcgccagccggggggtcaagccgcgacaagagaacctgtcgcggggctccagccgccggcgatttgccgcgcttcgacgacgacctccgacggtcaccagcggacgactcctgacgcccgacgatctgcactttgccagggagggagagaccgaggtcagcttcgggcgggaccttggtcgagccagtgcctaggcgacgagacgtaccgagcgatgacgtaggtaagccaaggatcggtcgaaagaccgccaaggagaacgcatgccgccggccagccgtcgatgagccttgccgacgagggtcgcggacccgagcgcgggaccggcacgaaagaactacgagtgaagaaagaaagcaggcatcagcgatgcaattcgatggcgcgcaagacggcgaagcaggcgtgtctgatcgccggcgttaagcaagacgaaccttgacagcggccgcatcgagtcgttggccagaggagagcgagtctacagatgtcgtagtgaagcagtcagcctttataactgaaaagtaattagagaaaggcagagctgaagggcctacgcagaggcgctagtcaatgaatgcacgctcagcggtagcggggtcgccggcgattggcgcagtgcctgcgacgcacacaggataaccgggtcgacctgctaaggagcacgagaggacgagacaggtcagcaacaacacttgctaggaccgattgctcgagatggtcttgaggggcggacctctagcgcatcaggccgggagcaacaggaccacttcggcttccgtgtcgcgaagtcgaccgtcctggctacaagacgtcgcctgcgggccgtcttaccagctcgaccgagcagtgctctccgccacctacgtgagctcgctcgctgcctcgaggcaggccggggccgacgagttgcaagggctcggctactttgagccagaagtcgtccggggcaagaggcgcgcagcaggctgcgggggggcgagcgaggctgtgtaggtgaaaagccgtcgtcgagcaggccagagcaggcgggccgcgagtgtgagaaggggggcttggacgcagccggacgagccgctcgtcaggtcgtgtcgctggtggaggactttgcgccggattcgtcgactgagcgaggttgccgtctggctggctcagcggccggaggcagcgacggcggcggcaggcggcagcggcggcgaggcggcgagacaaggtggacgatcgctgcgaggccgctctcatcgcggcccatcctacgtcgacggacaggccggtctggtgtcgatgagataggtggcagaggacatggctgctggcacaagcattcggggacgaggtcgaggatgcgaggaaggggttgcaggtcgggtcgcacgcagcagcagctgtgctcgcgacgcgagccacaccagcgggccgcccgccccgcagcgagctagagcggtggcccgcacccgcagacagacacgcccacctcgacccaacctgaatggcattttaaccctgcccaggagtccgagcgcaaaacgccggcgacgcaggatgctgatgaggcccatcaatgggcgcggtcaggacacgagcgagcagagagtagttacagcatggtcggcctaaatacgggatgagaaggggagcgacagtacggttgcgatgggcaaagatgcgtgctccagcggagcacggaagcatggggagaacggcaggcgtgtcgctgctcgccagagggggaggcgagagacctagatgcggaacgggagccggccgagcatcttcttatcctcctggtcgagggtcgagggcgcccagggtggtcggaccgttggcggcggtgcgatcggcgggccgggcccatccctgggcagccgcgcatcgtaaggatgcggcaggaagagatttggcaccccgcggccgatgccgccgccaaatgtcgggtaggcggccacggacgagcgctcgtagacctgcgaggaggtggcctgcgttgtaggcgtggcgtacgggtgccggtaggtcggcgaccgactgcgccggtttgaagatgggggtcgcgaccgttccgggccgttcagggatgcgagcgagagtgcagaggaggtcgacggcggctcgattttgacggttgcaccaagaccgaggagcgagacggcggcagcggccgaagatgacggtcggtcgaggttacgctgggattcgagactgccggacccgcgcgagtgcgacgccgagccgagcgcgaactcgccagcgtagcgggccggtggagggaactgagccgaagccggactcgtcgaccgcgttcgttggctcgtccgagtccgaggcgggggctcgacttttggcgggcagcagccggtcgaggcagaggaggccgacgccactggggtactcgactcgccgcgcgacggaggtgccgacagcacatcggggttgaaaatgaagctgacagactccttctggcgcgcccccacggccggacgctgggaagcagttcggattccggcagagcgcgagcttgcagcccggctgctactcgagccgctagacgacgacggaccggccgcgccgagcggcgggtacgtgtgccaaagcgagaggtcgagcgtcgaaaactggggttgctgcgacggccgcttccactggtgcatcgtcaggctgcgcgagtacgagatgatgtctggagggcgggcgtcgagtcgtgtcagcgaaagagacgtgcgacttaagactgcgaaggctacacacggtatttcttgggggcagcgccctcggcgctgaagaaggaagagggccagtttagcgcagcgctcggttcgctgaggagcagaggaggacgtacgacagcgtcaaagcaaagctctgcttaatgaggccgttctcaagccggcacgtctgggtgctgcagcggcacaaacagcgagagtcacgtcagcgcttaggtcaattcaagaagaaggagaagtcgcgattgctgacctccgtccagccggtcctccacaaggcacgacctttaaaggatggcgaggggacgagcggtcagcctaacaagggcctttcagaagatcggatcgcggacgaacctcgtcgtaagccagaaactcgcccatgacgcgcgagcacgaccaccgccggccgtcggtccaccgctgcatctgcgtctcctctgaagggcggaagggccgatccggcgggggagcagagcgtcagccacagagcggaggcagcagcgctaagccgttccgacagtacgcacgctcttcaaagatgaacacctggcgaccggggatgcaagacgatgtcagctgggctctttcgaagctctgcttcagccaggttgccgacgcgaagcgcctctccaagcgagcggcaaggtgcgggctgcaaacatcgatgaggccgcggtgggctgacgagggatgcgccctctcgtcacgagccgagccaagaaggaagggactcacggcgccgtcgtcgatcaggtcggcgcgctcggtccgcgtcagccgacgggttgtccgggggatcaggcattgcctggcggcttccatcaggatgatcctgaaggggggaggagcgctggtcagtcactcgtgcggagcgtcgaagctcgctctcccgcgagcccgggcggcggctgagcgaagaaggcctgtcggagagcaaagagggcacgcacgcatcctctgggctggcgagaaaggtccgcgtcgccgacggagcctggattgaagccatgtcggtcgggtcgtgtgcgaagcaaagaggagggagtgagggtttcgaggctcgagaaggggacgcacggtcgggccggccgaagcagagacttaaacaattgtctggcccaaagatccgcagcccagtcacgacgctcgatcggcccctctgctctggctcgccctcggtcgaggccgggagcatctcctgcaggccgacgacgaccacttacagaccggcagcatcctaccttttgactgaccgactgacatgcgccgcttcgggtcgtctctggtctggccgcagcagaggatgaaatcctctcgctcgctggcttgctcgagtggctgaccgcgggcttctcgccgcacgccctgcaggacgacctgccatcggccgcgctgaccgatcttcttctcggcggtcgaggcgcccataagagagcgaataagagagcgagagggctgactgtccctgcacctttgactgctcgcgcctcgagcgactgccggttcgcagaggtcaaggtgggcgagtggccttcgaccgagggcatgagcgctcgcgcttgatgcgcatcatcacccggcctccctccagatgatccgctgctcgctggccgtcaaagaactatgccagtcacgctgacgcttggctcgcccgtaattgcgtccgagtgactgtcccgctgagcatcgctggactctcgcctcgagcagaccatgcgccgtgcgcccgacatcggacccgtccctcgccgcctcgtctagtccaatccgtcgagcgacacctcatctcagaaaggagaggccgggacgacctcaggacaagatctgcgcctccggacgaggcgcgctctcgccggtcggggttgtagacgcgctcggcgtccaatctcccgcgcccctccaagcggaggaggaaacactctcgcaatagggggcggaacctgcctgcctccgccttgaagtatgcccggaggaggatggcggcccgaccagtcgttctggctgtgtgattccgcaggaatgaaggcctccgtcggcggccgcctgcgcgcgcgtacagcggaggcgtcatgcgcgactggcgagccaaacaacgcccgagacgacctctggttggcatggcctatctgctgtcttcctggcgcggaggctctctcccctaccctgtgctcgattcgaagcgtctctcggatctgtcgggggctgttgtttttcgtcttttggagaggtgtctgcttgcagtcagaggcagtggtcgaattaggcgaggctgctgcttccggagactcaattcacaattcgatcacgaagggcccagactccctttctcaatccacatccgaagcgcccctgcgaagcttaggcgaagacgtagtcgacgacgtctgcccagaccgccctctcgtcgtccacccgtcatcccacgcttgcctctgcttctcgacaccttcacttcgcccctttctgcaagcatccgcctcagtcctgcccctcactctcgaccgagggcgccgcatgagcgcgaccgagaacggctcggccggcccacccgccgaggagggcagcggcggcatggaggaggcctcgcacctgctcgagaccctcggttcgtcctcgagacccctgcagcttcaaagctggctggcccgctgacgccttctgcttgtcgcccggcgatacagagagtctgccgctgcaggcttacctctcgcttcatccgcatcccatctttgtcctgccatcgcctcgcctgtgagtcgttccgaagctgcccgctgtctgagcgagctggtagtcgggctgccgacgtgtcggcttgagagcgagagcaagtttgctgactggcgcatgccgtccctcgctcagctcgtcgtcgtccgccccgtcgctccgaccgatctggtcgaatgcggccgcgctcaacatcctcggcgactcgctgtcgagctgcctcgacgaggccgagcaggcgatgctcaaggcgtctatctcgcagctcgacctcgcccaggaggattcgtcggtgtcagaggcggcccggccgggcgaggacgcccttatgcccccgccaaagccgcccgcgacgccaggcggggttgtcggcagggcgggctccgtcagcacaggcacgaacaccaacacgaccgggaccgacggcagcgtgtcgtcctactttgacgaggctgcgcagagccatgaactctcgctttttcgcccggattggaccgttcacaagacgttctacgccctcgtagtacgtccgccgcccgcaaggcagggacgattgatgacgttgcgagcaattgacatcgctcttcctccatcccatacagacgcgctcaccccacccgtccttctgcatccttcacctgcatccgccgccgaagaagctttctgtccgccggggcgaggcagtcccttaccgaggccagttcctcccgccgccgacgctgcactcaagcgcgcggtcctcgatcgcgccctcgtcgcgggccggaggctctcgccgaggtacgcgttctggcagcgacatgggctcgggcacgggcagcggctccttctcgttcaccaacagcacgttcagcggctcgatcggcgtcccgcctcggtcgcggctcaaccagcagcatgcgatcgccgaggaggccgagacggacgagggaggctcgagcagcaggtgccgagccgctgatggccggcagacggcccagccgggcgcctcggtcggatctgggagcgtgtctgacggactaggaatggcagagagggcggacgatcgcgagcgcgagatcgactcatccgaagaggagatcgtctcgtgcacctctctcatcacgcagaccgactggtcggagacgccactcggcccggtgcgttccagcaaccggttgtgctctcatgccgcgctggctgacggatccttgcttcccctgttgtgaccctgcagcgcgccaagtggccagggagcttacggacggcgctcagcatcctcatcaagacgcccaacgaatgcgtcatttgtgaggacgctcgccggcctttgccacttcctgtgagctctgctaaccctcgccctcccttgcctgcgcgacctcttgcagggtggggacctgagttcatcatgctgtataacgacctgcatgcgaagtcgatcggcaaccagcatccggcctcattcggccgacccgcggccgaggcctggggcgagacgtggtccgagtacaaggcgatggccgagtcggtcatgaacgacggcgccgccctcgcacgcgaggacgacctcatctttctcaacgaggtcgagacgtaccaatcgtggcggtggacgccgctcactcgcggtgacggaacgacaggtccgttcttcgccgccttttgcgatattccacgggggaacatcgctgaccacagtcttcctctcgttcgtcttgcgccggcccgaagtaggcggggtcatgatcaactcgctcgatgtcacgcgcaagatcctcaagcagcgctggctgatgaccatccgcgatctttcgacccggctttgtgcgctcctttgcttttggtcggccgtcaaactgcactgctcacgtttgttgaaccctgggacgcttttgcagcttcctcaagaacgatcgccgaattctcggagaacgtcctcaaggtgcggctgctagtcttgtcgctctcgcgctgcctgcccgctgacccttgccgccatcgttcgtatcactagacagtcgagcagagccccgaggactttgcttttgcttacctttacgccgccaaggtgcgctcttgagctggcgaaagctatgctggcttgtccttcttgtcctccactgaccctcggtcgccctgcctatcgctcgcttcctagaacatcaccgccgcaacgaccgagaaagaagtccgtccctggcgggctcgcaaccctgctcgtgtcggaccatccgggtgggcagtcactgacccgcatctgctatcgataagcaggatattcaactgcaattggcagggacggtcgggtacgtcagcctcggctccctctctatcggctcacgtgcgctagactgtcgctcacccacgtcctttcgcctttccagcgtgccgtatctccattcgtcggcgccgcagacgatcagcctcaacttccaagagtgcgtagcgcgcgcgatcgacgacgctcgtcccgcgctgctgttcgtctgacacgcgtgtcgatcacagattcgacaagaacaagccgcagatgatgcctgacgagactggcctggccggttcgccctggccgttccgcgaggcgttcatgacgcggcggatggtcatgatctgggacctggtcagttgctcgacgccctctgatcttcctgccacccggtctgatgtcgagtggccgaccttctgcaccaggcgcccgagcttgccgatgcgctcgagcatcgctcgtggggtgatccgccgacgagcgccgtctgcatccccatcaccgacgactgggagaacggtcggctctctttcctcatcgtcggtttgaacactcgccggccatacgacgccgattatgaggaattcatcaccgacgtccagtgagttgcgaatctcccgcacgctttgctgttctgctgtcgactgacgtctgttgctctcccgctcgacaggtccttgctgctctcgaatctcaagggtatcgccctcttcgagagcgaagctagacggctgaagcagctagaggagctcgaccgagccaagacaggtgcgtcgaccgagggtgcctctcgtctgaagtccccgctgacaactcgctttgctttgttcctcggcagtcttcttcacgacgatctcgcacgagtgcgcaagcccttttcttgatttaccgtctccatcgttgtgctgatacggctctgtccattgacgcccctcctttaggctcaagacacccctgacgctcatcaagggcccgatccacgacctgagcaagggcgagcaggcgccgaagcgaaagaagattttcacgctcgctctggtcagccctcgtgctctggctcgcgactcgccctctcgcctgaccagtcatcctctcgccctgcagcgcaacatcaaccgcctggcacgcctcgttgacggcctgatggactttgcgcggctcggtaagtattgagaccatcgtctcctgctgcctgcgcgtctctgtctgacctgtgccttgcatgtttgcagaggccggccgtttgcgcggcaccttccggccgaccgacctcggctacttcaccatcgacctcgcctcgagcttccggtcggcgatggagctctcgcagctcgactacgtcgtcgactgcgagccggcaccttcaaaggacatgctcgtttttgctgaccgtgacttctgggagaaggttgtcttcaatctgatcggcaatgcgtacaaatacaccctctctggctcgatcatcgttacggccaagtaccggcccgagggcttcgtcttcagcgtcaaggacaccggcgtcggcattgcccggcccgagcagcaactcgtattcgagcgcttccatcgggtcgagggcaccgcccgcagccacgagggcacaggtgcgaataggacactttggtgagagtctacgccaaccgactgacaccttttgctccgctggcctacgtaggcatcggtcggtctcgccctgacaggttgtgtctgctttgacggaactaacgctgatattcctgttcccgcttacttccttgttcaggtctctccctgacgctcgagctggtctcgttgtcgggtggtcagctcgcgctcgagtcgacgacggcagccgacagcaaggacggccagtcttctggctcgactttcaccgtcacaatcccttatggcaaagcgtacgtcggcgtcgcaattacttgctctaggagcccaactgctgatgctcgccctttcctgtgcgtagccatctgccgcccaaccaggtcgaggatatggaggacgaccgacacacgggcaagactgcttacggtgaaggcatcctggccgaggccagcaggtgagttgaagatgccctcttgcggctgcctttgcgcgcaagctgacgttccgatcgccgcacagatggggcaagggcggccagtccgactcggcgtctggctcggcttcggccggtttctccgacagcggcatgtccaactcggatgtacgtccttatgcctgcgtctcgcggtcgcttcttctagggactgacgacgagaccacgtcaaacccagtcggtcggcgtcatcgatctctcggccctctactgggcgaaggacaaggactgcatcctcgttgtcgacgactcgagcgacatggtcgcctacctgcgcagtctgctcggcgtctactgccgaatcctgacggcgacgaatggccaggagggccttgacatcgccatcaagcatcggcctgacctcatcatctcgtacgtcggtcgttctgcttgccgtcattcccctttcggccccagacgtcaagctgacgcgccggcgtcactgcgcagcgacatttcgatgccgatcatggacggcgtcacgttcctcagccacctccggcggcgagaggacaccgagctcattcctttcattctcctcacggcccgctcgagcgacgaggacaaggtggacggtctcctcctcggagccgatggtgagtccgccttgcgcgtttcttgcgcagcttccagatcagtcgctgacaacctctccggcgtttcagactacctgacaaagcccttcagcgggaaggagctcgtcgcccgtgctcgtaagcaatgcttcgagtctatgtctagattctccgggtcaccgttttactgacgacgccctaaattgctttctacagatcttcagacgcagctcggcaagaagcgatcgcagctcgcgcaaaaattccgcgagcagcttaagacgaagtgcgcaatcatcggcttagactgatcgagaaagaacaaagctgatctattccaccttgcctcgcagccaactcctcatcgacctctcgccgtgagtcttgctgcgcgtctcaatggcttgtagtccttgctgacgttccccatcttctgtcaggatcggcatcggccgtatgtcggtcgacggcgacgtcgagcagctcaacgacgcctactaccgaatgagtgcgtggcgctccctgctcggtaaatctttgcgagctccagctgaatcaattttccgcctcatcctcttagctggtcagcctaaagacgccccgaaggatacctggctcgagtacctcgacaacacgtcgcgcgagtgggcgaccggagccttcaagcagctgggagtcgacgtgagcccctctcttcccctagcttcggcagtagctcaccgtattgttcgcgactgcaggcgcacggcttcacctgcgagctcctctggcggtctggaacgtggacgtacacccaagtcgtgcgtcttttcgctgccggctgcgctcggagatgacgctgaccggaagttcccttcgtcaacaaaggtcccgctcgctggagataccgaccggagccacggcgtcatctgcacgcacaccgacatcaccgaccgcaagcggctgcagcagatggaggtctcgcacgagcgctcgcgcttcgaggaggccgaggcgcagcggcagaaggccgacgaggaaaagtgcgtcccatctgactcaaacagtcgcctacagcacggactgatgccttgagtgtttgcttcacccattccataggcggcagcaagaattcttaatctcggtcatttctcacgagctgcgcaacccggttagcgccattctccaggtacgtcgcccgaagctctgcgcttggctcgtgggcccgctttgctaatagcctcgaccttctcgacgggggtttaccagtgttgcaacctcgtgcacggcaacctctccttcctccatgatgagctgaaggcgtgcttgtgcgtctcctccacccttaagtgtcggtatccgtcaaacgctaggtcacactgacaactcttcgtacctcacagggagcccgaaccgccttttgttccctcgcggcagcttctcgacctcatcaccgaggatctgtgcgtggcgaagctgtcagacccattctcgacggcgtgctgaccaacccttccgctgtcggttgcaaaatagcgatgcgctcgacgtcagttgtcgtccacctcccaactctatctcaaccgccctgactgatcccctcacctggccctgccgttcgcagagcatccacgagatggcgatgtctcaggaacggattgcgaatgtgcgtctctgttgagcgcagatctttgtcaagcgcttggctttgactgacactacgcctcgcgcttctccttgcaggacgtgctgtcgatgtgcgtgtgcgagtcggcaccagcttcaatcgctcgctgacatcgccaaaattccgcaggggcaagttcacgttaaacacgctcgagagtgagtctcaagcgactgtcagctcggcctctgtcgactgccgctgatagctttctgtccttccagtctgcccgatcccggtcgacctcgttgccgaagctcaaaagacgtccgtcgcgctccgcgtgtctgatccttcgctcgtcgttcgtccaagctgacttgctgtctttctgcacccgatagcatcgccacttttgccaccgagtgtcgcacgaagcacatcaagctcgagctcgtcatcggcaagcaactgaaggctctctgcacccggggcaacaaggtcttcatggccgacccggtccggatcggccagatctgcttgaacctggtgtcgaacgcgattcgcttcactggtcagcccgatcgtcgtcttccttccggcgaacgattcgtggctgacgcgcgacctcccttctggatcgaccgcagcaactgcgcccacacgcaggatcacctttcaccttgacgtccggcgcaacccgcctgtcgacgactcgtgccgtgttccgccagaggacctcaccgccgagaccttgccgccagactctccttactacctgtacggtgccgtcgaagacaccgggtgcgtcggtttgacctttaggcggcttcaagcagcatctgatccgactcgggcttctctcgttcgcagacctggcctcaagcctgaggagctcgagctccttttccgccgcttctcgcaagccaacaaggccactcacagtgcgcatctttctctccagcacctgttttcagccgcttgagctgacgagaattctgtgtccctctcttagccgtgcgtccgattcggcccaccgatggctggcgcgttgcaaggcactgacgcttctggttttgcccgtcccaaccaggtctttggcggcagtggcctcggtctctacgtctcgcgtatcctgacacaggtgcggtcacgcagtcgcgcttgctggctatgactggcgccctgccggcaagccttgctgacatagtcaatcactgcctcagatcatgaacggtcgcatcgaggtcgagtcggtcgtcaacgagggcagcagtacgttcagcccacgacctttgttgtgcgagttggctcgtctgacctatgtgcccacattgcctagccttccgctacttcctcaaaatcgcgacaggcgctcccggcagcaaggtcggtccgcgtaaatcgaagccattgccggtcttcgagcggccgctgcacatcctcattgtcgaggacaacgagatcaacagccgcgtcctctcgagacagctggtcaaggcttctctcacctttgagagtgagttttgcccttcgccggtgcgatgcctcgtgctgatttcaatccgtctgttctctttttaagtcgccatcaacggtcaagaaggcctcgacaagatcatcggctcgatgcaggacggcatcgagccctttgacgctgtctgtcttcaaactcgccgtcttgcgatactagtctcgaggctgaccaaccgtgagcgtcctggtctcctttcttcctgcaggttttgatggacatcaagtacgcctgctttcgctgaatctcttgacgactgagctgctgtgttgaccccggcctgccctccccgtctcctttcctcttccgcagcatgcccgttcttaacggcatcgaggcgactcgccgtctccgcgagttggaggcctcgggcgaggtcccgcggaggaccgtcatcatcggcctcaccggcaacgcccaagaggagcaagtcgccgagacaaaggaggccggtatggacgtgagtgcagggcctctcgactgctagtaacgccaatggcaggcgtcgtatgtcaggctgctgacgcgtgcctctcgcttccctttcccatccacagcacacgatcatcaaggtcagtcgcccaggttctgccttgctttgccgcttcaatgctgacgcccgtatttaccgctcgaccttgcagccctacaagattgacgacgtcctctggaccctcaagggtctgtaaaactctccttttgcacgtctgctcctgtccctcctgttctgtacttctggtctccttgcaccgtcacgcctcccccgcctcccaacctagactctcaatcatcttagtctccgccattggcggaccaaatctgtttcgactagcaacactcccgggcgggctcctgacgtcgtgtcgaagccgcccatctgtcgctctacctctctctctctctctctttcctcctgggctttctccgtcgtactcacgcacctcacgcaaaccttcctgtagcatcatctgattgcggccgtttcccttacacatgacccggatgcgccacgacgagcgcaacacgagtggaatgcggcgcgagcatgtgcaagtagctggcgaccgtcgtacgcatcgatcgctcagagctgctgcgcggctgccggcgggccttcaccatcctcgtccgcctcctcgactggcctcgacggcctcttaacgctcatcagctcgaagctcggttccatcagcgcccgaccagctacgacggcacttcttcatccggcctaccgagtcttggtgagcttcaagtggccttagacctcctgggcgccaacctaagtagcaaggctgaccccctttcatcacctgccttcttgccagcagcaacgtcagcaaagcgcacccggcctccagtggccagtcagagcccctagaatgtgagccgtactctgttgtgctttgctgtgggctgtttgttggacctgagctgacagctttgtcgagatcaggtggtcatcgtcctccgccgccacggtcggcccaggcctgctgccagagttgcagcagatgattccccgagcgatctacatctatctaaacggtccgggctgtgctactgttgagcacacggccgcttggcgggccaacatgatcaacttctcgctcgtctcggtcctatggcgggtgagttgcggcgcgcgagggcatgtcgtctggcacgcggccgtccccaaccggcgtcgctgacccaactcctccttcacgacggtggtcaggatgccagccaagcgctgctcttcaagcacctcgactttactgaggaggaagaaggagacccgcctcgcgtcgacaagctgatccgggcgctgcggtcgtccccgcgcccgcggggtacgtgcacagcgtcgcgacgggcgacgagggcgggcctaccgcccaagagctctgcctgcgtcacctgcacctgatgtcggccatcaaaaatgtcatacacgtcccttggctggactgccagcttgcggtgccttcatctctcgtccgaccgacgctcgtcaacctcaccgtctcgttcctctgccgacgcggatgcaacccacctggtggtacgacctcggcgcgctcgagaacctcgacatttcgatcctgtacggtcccgtcgactttgacttcctcgtccgctttctgcatggggtctcgctcggcctgcgtaagcgagcttcgccacttgggcagtacgacggtcctcgactgcggtcgcctgctcgacctcatcgccggccgcttcacggccctccggtcgctcgtctttgtcatcgcagactgccaggtgacggccctgccggccaacctgctcggcatgcggccgtcactccggtcgccggagctcgtctaccccgagctcgatctcggaacaatcctgcagacgctgcatgcgttgctcatcgtgctcgcaatcggccgccagtcgctcaagcggctcgccaccgagccagacctgctcgaaccagccagcgggcttgggacctgcttccgggccgtctgcgagagccagaggatcaagcccaagcggcacccggccctccactctgtcggcctcgtcgacgccatcggagtcgtcaactttcgatcggcccgcttcgcgtcgagtccggacctcaaacgaattacagacgagctcgtggccgtcgaccttgagctcgtcgatcctgcagggcgcacgctgagcagcaccgactgctcctcggatgaggaggagacgagcagctcgaacgacgatgacgagggcgatgacgaggacgacgaggacgccgacgactccagctagggcggcccgagcgaaggaagtctcgactaagggccggatctgatgtgctgctgctcgtacttgtcctgacgctgcttctcgcagggagcttcgaggtgggccggcgcgtgaacggcaggaggggtgcgtgcgatccacaagcgcgggcgacaccagagatacgagtgaccagagatcagctcgtctgtctcagtcgtcagcttgacgcagacccgaccatcagcccagacttcggtcaaagatggcggtcaggccgcctgttggactttgacctgcgcgtccttttctgtctggccggagtgagtcggaggcggaaatggaggctgggcgcgcgcgtgccccggcgaggtcaaggtcgcgccgctgctgccgtcgaccttcccgacctgccctcctcgacctttgtctctatccagtagcagccctcgacacttagtcccctctgacaaggccatccgcaacctcctctcctctaccgacgccgccggaccgagattgaagcgctcgaggccgctaaaaaggcgcagagccacgtcgcgccgcgctcgcccctccccttacggcccgcctcggccatgaaacgcactcgcaacgcgtcggtcgacctgggatccgccgccgccgaccagaacggctccgccgacgccgccgtcacctctgcaggtctgtcttttcgtctcgcgcggccatctctcgcggattgcgtcgctgacctccgccctcgccctcggtctcagctacggcccacctgaccggcctcggaagcaccgacctcaatggcagctcagacgctgctgatgctgcgacaactcgcctgctctcgccctccagcgatccgtcagcgctcaaacggcggcggctcgacgcgccctcgaccaacgacattccgccgctttctggcgcggctgccgagctcagccagccaggcgagcagttgccagccgacgaggccgacccggacgaccacgcgctcctgacagcgctcgcgcaggcgcacgagggcgactttgacggtcacctcggccatgacgaggtcggcctcgctgaggatggctcggctgagacggaagcgggcgacgagggtgttgatgaccggaagctcacggccggcgagacggcccagctgcttcagatctttgaagcgttcgtccctgaggtcgtaatcttgtctccgaacacgagatgcgagatgttaacgacgtctgatccatccttctgcagcatggcgacgtgtcttgttgcggacgagagcgtgctcgaccggttgccgcatgtcgagaccgacccgtcgctccagagcacgctccgccagctgctctcgccatcagacgagggcccgttgcgacgagacgttgaggtctgtgaagctttcagatccatgccgccgcgtcggccaaacgctgatgcagacggcgtccacagactgccctacaggggctctcgaccgctgcggatctggctgcagcgacttcgcgatgcgagcgcactggtccgagcgaaacggtcgaggtcaagcgggcgcgagaggtggccttgtttgcgcgggatgcgctgcgcctgctcgatagtgtcggtggcggaaggaagggcaaaggcgtcgcaggtgcgcatcacaccctcgccatgtcgatggccgatgctcaaaggtcctcgaccaccctcgctgactgccccaccgttgtcctacgcttcttgcaggccggaaacggaaggtcgcgctctaccagaagattgcctcgcatccagcgcacacgacgcagctctttggaccgcgctacttcactgagccaatagacatcaattcggacgaggagcttgacgacatcggtacgtctctcgtcaactagctcgtgcctctgactgtcaactgactccattcattgcgggctcaggatttgcgagcgtcgtcgagattcatccgacgccagaggtcccgctcgaggagcagccgactctcggacagagctcgagaccgaagcagcgaaaagtcaagccaccgcctgcggtgaaggacagcgcgcgagtcggtacgcacctgccactccttgacgcgctcaatttctgtagcgcttgaagctgactaaccgctgcctgccgacctgcagtctcgattttcccgcgggatgaccccttcacatcctttctccctgcctacgactcgtcggcggcgacgatctcgctctcggagaccatcgtgcgtctccgtcgagccgaggcgctcgacctcgctcggaaggaggctcaggcccttccgctgccgacctgggcaccggaagagcagagctctgtggccgacggcgttgatgcgatgctgcggaagaactgggagcggctcgcacgactgagggagtcacaggtcgcgcgcgtgcgcaaggggctcgcccaagccgagggaaacgaatctgcgaccggtgcgcatctcccgttgtctcaaggcgccaaggtgccgttacttccgtcgctgacctcctataccgcttcgtttaatcgacgtagcgcaagaattggcagagacgctctcccacctgatcgccctccggccaacgccgtcgatactgcccgttgcagccgacctccgcgccctgcatcgcgtcgtcggcctcgacaacccgcctccatcgtaccgcggcacgctcgatccgacccgaaacctcgcacttgccgacaacacgacgctgaaagttgtctacgcgcagcctcctctgccagcgcatccctctcagcaggcggcgccgcagccagcaagagcccgccagggctcgtacggccccgctccgacgtcgggcggccagacctaccgtgcacctcccggccaggctcagaggccgccgagctacctgcagcagccccaacagcagcagcagtaccaggtgtcgccacgtctcgcctacggctcgacaagccagggcaactcgcccatgcacggcacaggctcgccttacacccagcagcaacagcagttgccgccgcctcagtggcagcaggggccgacggcgggcggcctgcaacagaatcggctgtcgctttcgcagcagctgcagcagccctccagccaatacgacagccagcaggcctactcgcagcagcagtcggcgccgatcccgatgatgggctggaagggcgcgtcgacggcgctgccgtcgctcccgcaaagcgtccaacaagcacccgaaggcatgtggtgagcgacggtcggcctagggtgggcagggcaagggctacctttgaaaaggcgattagaatgatcttaattgattcgagcaacgtgtcgcaagttcggggcgtgtaagcaggcaattagatgtcgcttgagtcgacactggagttcggagcgtggcgtcgccctcagatcgcgatctatcggaccaagatgcacgaataaagcaggcgacacggcatgagatacaagtgagagaggcggatcagactacaacgagatggcggaggttacgccttagagtcgcgcgctgcgatcggacgctcggcctggggcgagatgcgaaggccatgccggcgggcgtcgtggttcgcaaagtcgacgacggcagtgtgcgtgagcaggcggttgtcccagagctaaagcattggagtgacgaatgggtcagcgaacacagcatctggtcgaggcgaaggcaaggacgtacgacgaccgttccgggctgccagcggacgcgggcctggaagtcggcgccgcgggcgatgtggtcaaacaggaaggaaagaagcgtgtcgctctcctccttgcgcaggccaacaatccgtcgggtgaagcccgagttgacatagagcgccttctcgcccgtcaccgggtggcggcggatgatggggtgcgtgtgctggacgggctcgcgacggacgttgccgccgtacgcgccagccttcgtgcgagcaacctgctcaaagccagagtggacctgcagcggcagatccagacgttgatcagcgatcaagagacaaggccccgagcagcggtggacagaggacgtactgcatcaagcccgtcgaggaaggcctggacggcaggtgacagccgattgtacgcctcgcgctggtcgctaaagatggtgtcgccaccgctgtcgggcgagtcgagcagaaagagggtcgtgagaccgagcggctgctcttcgtacgagacgtcgcctgcacaagccgcgtaagagcaaacgttggcgcaagcagggctctggggggccagcggtgacgatagacgtactgtgccagccgattgatgacagcgtctccctgtcctcctcgttgaagctctggccaaccgagccgtcggtacgcccttcgcgatacactagatgggcttcatcgaaacccttgggggcggtcgaagtctggtgaatgtgcaggcgtccaaagtgctggcagatcgaagacagggtatgagctacagtcgcagctgagagaaggggatgagacgactcacagctccccaagccttcagccagtcgaacgactgctcgccgaactcttgggatcggaaagcgacgacgcctcggcgggcgacctcgagcgcgacctggtcgcggccgctagagtcgagcgcatgcagcttgaggccagagatctcgctgccgatgcctggcgtaatgtaagtcgtgcggacgccgacggcctcaaagatagcacgcggttgggcgagcttgagggcccggtgtcccgggtcgtcgtgctcgaacggctcgaggggcggcaagagcgccgagggcggcgtgatcgacggcaaaaaacgcgcgtgccgatactcgggctcgacggtgaactgctcgcctttgagcttgagcgagccccggttgtcctggacgtactcgagcgctgttcgggaggggttggtagacatggcaggggtgtgttggcaggctttgagagatcttttgcgttgagagcatttgcctcgtccgtctctctttatacggatagtctagtgccgacgcgatgagtagatcgctgacgcctgaggggtctggcgtcagtagaccagtggcgaggtgaaggcgccatcgcatgtgctcctgtcgtgagaccggcggcggcgagctgcgtccggcggcgcctgacccagctaaccaaggccgcttggatcagactactggcaagatgagcatcaggtctcggatctggccgacatggtgaccaataggccgaggtccctgcgacccgagagggcctcatcgcagccgggcgactgagggttaggcggaaacgttgtgagaggggagccggaggaggccgccgccgggcgaagggcgcgtcggccggctcttctcgacgtctggacacggctgggcctcgagacagtcagcaggctgtgtgagctggcttctgcaagcaccaggtcgtcgactggcacgtggatgagtgcggtcgagccaggcgactgtcgacgcttccaagtcgactcgcgaggttcggccgacggcggagtttcaaagcgccgagttgtacgacgacggtgtcggctgaggtcggacacgacagcgagggcgatgactgagcgcacagggagaggaaagaaggccagcagtacgttcgccccaacgtccattccgcgttctttacctaggagcgatcattacaaagagagcgctggctgcactggtctcagcagggtcatctcaatctcacagcccttcggcatcactttcgtcgaccgagatgggcatccgcagccatcgccggccacttccgtcagcctctggcagacgcccgcctcggaggttgacctgcagactggcgtgcatgagcctcggcgttccgagcgtcgcgtcgcgctcctcgcgcatgcgcgcaaactcctcggcgacgatccgcgagttgacgtgcttgttttgcgcgcgctggtcggcgaccgatgagaagcacgatttggagcggtcctcgcccgggtagtcgtgcccggagaagatgcggaagtcgtcgggcagcgagaggagcttctgagccgacgtgaagagatcctgggcgctgccgccggcaaagtcggcccgggctgagccgacgtcgggtctgcagagagggtcagtcggggataacgagtgctcgatagaggattattggactcacaagaagatggtgtcgccagcaaagacggtgtcgccaatcaccacgccgatgtgatcgggcgtgtgaccgggcaagtgaagcaccttgcactcgagctcgcctacgcggaacacctcgttgtcctcgagcaaaacgtcgaaagagccctcgaaggcgctggacgccaggtcgtagatcggcccaaactgctcctggacttgcgcgactcgccgaccgatcgagatggggcaggttgagccggcatgctgacaagatgacgagaggccgtcagccggcaggaaagagcagcagcgtggcagcaacagcgacgcaccttttgccagacacgagaagcctaggaaagcggagcgaacgagtcagcggccaactggaggtgccctggcacacggaagacgacggacgtaccgaaagatggtcggcgtggacgtgggtctcgagcacgcgcgcgacagagtaggcttcctgcttgacaaatgctagcagaccactggccgtctcggtcgagatgtgacctatgagtatgagcggaagacagaggtcgacgtcaattagcgtcgagtgacgggcggcggcggcggtggggcagaaggacgtaccggaggccgggtcgtagtcgagggcagggtcaacgacgagcgtggatctggttgcagggtcgaccaccaggaattggaaggtcgaggtcggttgatgaaagaaggagtggaccaagggcgagctggcaacgccagcggtcggctggtgagtgcggtagggcgtcgctggccgagcgttcgctacgagggcgactgcgggcgagccaacgagcggaggtcagcctctcccgcaggatggcgagcgacaagcggcttgcgaggtgcgaggtacgaggtgcgacgcacaggtccgtcggctggctatagatcgagcggcgaggaggcgaggcgagagcgaggaggtcatggttgggaggcgagatggcttcgaaagcgtaggtcaggatgaggtcgagggctgagtcgcgttaatcaggcaggcttttgagcagacgatgcagcagcagacgaccgtggaaggaagacggcgaccgagcacagactggcagacgccgtcgtcggcgctccgtctctttgccgtcccgcgaggtggccatatcggaggagggcgccattcggaaggagaggggctgcacgaggcggactcggtcggcgtcacagggtcagcaggagccgctcggcagccgtatcggaattcaagccggcagtgggaagtttcctcccttccgaccggctccaccctaagaagggcgaagaggggaacacgattgctgaccgggcctcttgacctatacctctcctacctgctctcattgtgacacgatgcccgtgtcgcctctgccgtctcacgaggtgcgtccgagtgcctgtcgcgcccgtcgcggatcgccgacgcgcccggtcgactgttcggcctgctacccagagccggcctgactctctcgctttctctccgcagacgtcgcccagctcgctcgagtgccaaccgtcgaaggatgtcgacctgcgaccgacctggcgggccttctggcgcgagacggtgccgtcgaggagcctgacggcaccgctcatcgccgtcaccgccgtatgcggtctgttggacgcatctacccttgcgtacgtgggaggccgccttcttttcctgatcctcctgatctccataagctgatctgctcctcctcctcctcgtcgcagcgactacaaaacgttcgcgtcaaaccagaccggcaacacgctcgtcatgacgctgctcgccgttgggctgccaacccaatcgtccttggccttaacgctctcgtcactcttctcgtttctcatcgccgctttccttgccggtgccgtcgcaaggattgcgggaccccgtcgaagaatttggctcgccatctcgctcgcgattcagacggtgctcttcatcatcccgagcgcgctgctctcgtctggcatgcttcacgctcagggtccgcacgactgggttctgatcggcctgctcgctgcaggctcgggcgtccaagtagcgatggtacgtcattcgtgaaacccactcgatcactcctcggctgacctcctgaacggcgctctaccaggcccgcggttcgagcaacccagaactgccgtcggcgatgctgacgagcccgttcgtagacctcctgacggatccgcatctcttcgtgcccttccgacacccgcaatcgcgtgctcgcaacctccgtgtcggctacatcttctcgcttgtcggcggtagcttccgttagtaccctctctttctcccatcaggccactctcgcctcgcgtctgaccctgcctcgatgttgcccaccgccgcagtcggcgcaggcctcatcaaggcccactcgaccgagctcgtctggtggctcgccgtcggcatccgcttcgtcatcttcttctgggtcgtcgccctcgagggcgagaagccgccggccgtcgaaggggtctgcatcggttgaacgccagaatccgccgccgacgaagcactcgcttcgacgtttttcgcgcacatgctgcgccttgacgttctcgacgtccgtcagactacagtcatcctgcgaccctcttcgcacctctcatcacgggctcatgcagtacgaacaaggctcgctgcgttgggcaggccttagctcgtcgtccagcgtcgcgcctgctggctcgcccgcagaggcatctcgtcggcagccaccgatcgagcactccgcgcgctcgacacgacgagccgtgcgtcggcagagtatgcccctcgattgcatgccgtgccgtttacgtctgaacgatgcgagagacagcaacggggacgaatcgactcgaaacgagacggcttgagcgatgattgctgcgcgcgacgcgagctcgaatctggtcgcgtcgaaccgtcgacgacctccgcctaacagcgatgctgcccccgacaccaagcgcaaaggacccggtcgactcctaggccactcggcctgccaagtccgcagacggggcggacgcggtcggggccgcggaggctgcttaccgctatatcgagcttgctcacttccgccgcggctggccgtcgcacagctcgcttcaccaggactggctcgaagcccaggccagttaccagtccttgcgagaggagtatctcaaggtagattggatcggtgctcattactgctggtctcgaacggcgctgacccagagctcccacttgcagtgcctcgagtactggtcgggctacgggccaaagcgagagatggtcgagaagctgctcgagatgacggccgactggatcgatcaagactgtccggccgtccggccgtgcgttggcgtcttagtcttgacagctacgattgaggctgactctgagcctctccgaccgcctccgtgcttcgcaaggcctttttgaggcccattttgctcgcatccaagacggcagcgtcgacccggccgcatgccagctctgccacggcggcgtgctggcacgtaagcatccttgctacaaccacgggacggcagaggctcggcaaaagctcgaattctcatcggcggacgcggtgccggacggcgcgcacgactgtcggcagacttcggacgactatcaccggaagcgcaatgcggccgaactcgagtcgagctcgacgtctccggtcggctgacgccgatggctccttgctacatcgagccaaggggcggccactgcatcgaacgaggcaccctcggtcgctgctctctcgacgaagggctctttaagatcaaagctcgagtcgcccacacttcagggctctgacggcgcttggcctttccctgaggctccagcccgggccatcggcggcgccgctttgagtcagcccttgctgccccggtcggcttctaccgcttcactcgcaacatgccagacgagcacggaggcgctgcagggtgggcaaatctggcatgcatatcgatcgcgctggaggtcgaacgaggggatcaaagcgaagcaaaatcaggccgacgaggcaaccttgtcctgaaccgccttgacgagcccatcgagccagtcctggtggcctagcaacatcggattcggcctgaggatgggctgccggtcagtcagagtgtggggaggcggagaatcgagcacaggactcacttctgctgtgagaggtcggccgcaatcttgccgagctgactttcctgagtgaggatgcggacacggccgccatcgagatcctcgactacccatgcgtgcaggacctcgataaacgagtctccctcgccagttggtccagcccgccaggctagtcggccagccttgtcgggggccgaccctggcgcaaccgactcaatcacctgcgagggcagcgggtcgaggccgaatgtggcgaatgagaacgcgtcgccctgctcgaggaacgggcccgaggacggcggcgtgatctgcgagcagttgtcgtagtatgactcccagcttgtgatgtcggcgaggaggggcctgcgagcgcgagaggcggtcagccgaagtatcgttggtttgtgacgtcgagctatgagagttggaaagaaaaacctaccagacctgggcggccgaaagcccagcgacgatgacctcatttgagacgaagttgtcggttaggcctggcgtgtaccgcgcaggccagatgatgtcggcggtcatggcaggaggacgatcgcgaggcgggtcggctaggggcgtcggtagcaaaagcggtgagggagaagcgagctgaaggatcggacgagatggatcgtgcgtcagtagctgcaccggaagagagctcggaggataggcagtggacggaccaagttgagcggcgaaggtggtggggatgggaggagaaggcaagcctgcgagccgaattcgttttgacttgttcgctcgacgacggctcgcctccaccttgctcccaccagagcttcaggcagcaggtcagcagcttccgttcaggacgtgtcagctaccttgtcgtgccctcgcccgcagtctcgtaggcctgtcgaggcgtgagtcgcagaagaaggtggaggaggaggttaaagcttggtcagcccacagaaacgcgcttcggcagagtggggtcccgcgactgcctggcgaaagacgttcctttatgatacaatggagaaggggatgatgagccctggcagagtgtagactatataccgaaagccgcgaaggagataagggtcgtgtggtaaacgaaaacctgctcaggctgggctctgtgcgagttcggctgggacgacaagaacaccttgtgcgggccgaggcgagacgccaaccgcgacgtcaaccgtcggcgcctcgtccgctttgccggcggcggcggcggcggcttcaagcgacttctcgtagcgctgccagacggctccggcgtgctcgtgctcgcccgcggggcggaaccagcgcgtgtagcttccgcaacatccgcgtccgtaacggcgctctttgagctcctccgagccctcctcgacgcgcacggcaccgatcggtgggaagacgagaccgcttgcgcccggcagggtgaggaccggggcaagagcgccgtcgtcgagatagtgcgtcggtggagcggtcgccgaaggaggagggccgacaacggtgatcgagacgttggcctcgtgaacaaagtctcgtcgccgggagtgctcctgctcaaagacggggtgagggaggacccagcccgtccacagagcgtcgtcgttgtcactcatcatgaccggtgtgttgattgcctcatcacaggcaaatcgggtctggatgaacaggcggagggacgacacgtagtcgacaaacgccgtccggaagtcgggcatggtgtgataatcgctgagaagggtagggaatgagaaagacgggtcagcaaagccacactcgagttgagaacgagggtgggcggcacatgtggacaggaatcttgaggtgctgcacggtggcgcgtccgtcgagcgcgagcgggcctccgtcgagactgccaaagtacctgtagctggagctctcgcgctcggcacgctcgacctcgtccggcttgatgcgaaggagacgctcttccgcgcctaccagcatgcccaacatcctgccgtgcgccatgttgttccgtctggctgtcgatgtcaggttggcgtcggtcgcgcgcggaaactgctcgagccagcgcacttcgttggcgtcaccggtctgaaccgtcaggttaaaggggtactcggtgccgttcgaggtcgtgtaaagcgttgcaggcaggtacgtcgttgagtcgagggcaaaagtacgggcggcagggatctcgagctccagccggaacgacgtgaaattgccctgatcctggagctcgcgaaagcgaggtcaaccaagtcagctgctgccgcacgaggctgccaagcgaacaacacaacgaggacaacgcacgcaggccgggacaccgcgcgagccgaacctatccgcgtagcggcgctgcttttggccgtcgcgctgactagagaagttgacgacgatggtctcgaccggtccgtccttttcggctaggcccgcgggaacaaagcttgctcggccggcagggaagtcaagcgtcgagccattcttgagtcgcatcgcgaagtagtactcgaacagtgtctctgagttgaccatctgcaagcagcggcggtgcagagtgtcagctgaagggccgaagggcctcagccaggcttgagcgcacctcggcgtcgttattgcggtgtgacaatccgtcatgttcagccctgggagggagattcgtatttggaacagcgacctggaaggctttgatgtcctcaagagggaaggagttgccaacatctttgaaggaggggcatcagcaggtaccatcgttcagactgagcgaaagcaagacgacgaacccttggtcgacgccagctctagctgcgagtcgaagatgacatgctcggcggcgtgcacctcccaaagcgcagcgtccgagatgatcttgtctgccaaaaagggaatgagtagggtcatcattctcgcgccactgactgcctcgctcaacaggctttgaggcgctcactgtactcgtccatcatctcctcgtaaggcgacgaccctcgcctccatcggttgccgaggtcgaagatgtcgacgtcctcattcaaattccaaaggctgcccgactcgagctcaggcgaccaaacaggtcgaatggggaatgaagcgccaggagcgctgaagagggtcctagcgggtcagtgattgccggacgagcagagccaagacggggtcgatgcgacgtactggaggcgagtgatcatccgctgcttgtaccgaaggccgaccgaccagctctcgatgtcgctgcagtcggtgccgttggcggcgagacgagcgtgggcctcggtggaggagttgggctcaaggtcggccgcccgaacccacgcccggacgtcgcacgaccagttggcggcctccgccttgggctcgccctcggcgccctcgacgacgacgacaagaacagcatcgtcgtctccgggcaagatcggctggcggctggcaggcgtggaggccgccgggtgagaggcgacggcgggcgaagggacagtcggctgctggcgtgtctcgaaggcgggctcgggcggggcggcggcgacgagagtgtcgttgatgtaacgcgggatgcgcagggcgtgtacggtgctgcccgcgagcaggaggagcgggagggtcggtcgcatctggttgagagtcccagaagaagtggtgggtcgagggaagaggcggtcgacaagggcagcagcaggtcagcttgaactcagcccaccgcgagagatcatccgcagcagcccaccgccgcggatccggccgtctcaccgtggaccaaacacgagagcgagcaacgagcgcgagtcgtcgacctgccttatcgacgtcggttggtcaaggtgcactcttctaatctctcatcaagctacaaaaaagacggctagcgctacagcgaccttctatctctcaaccctctcacgcggaagagcgcccgacagcggcgctcatccctcactggacgtcgacgtcgacgcttcgaccgccgtcgtcccgtccgacgtcgcatttgcgtctattgtcgtcgaccttagatgtcggccgcacgcgtcgtcttggggaagccgggcgagggcgggttcgagaatttgctgcgagagacaagcgcgagcaaagtcagcctctgcgcagggcgaagtgagtcgaagactcggtcgagatgaggaaggagagacgcacgtctccacgaaaactttctggacgccgccgacatgacggtcaaacttgtcgtagaggaccgcaaagtcctcgaccggtacgcggtgcgtaaccatgaattcggtcgagaactgtcgcgaaaggggaggggtaggttgtcagcgagtgccacgcagcgaataacccagagcagccgcaccttgcccgtacggaggtagtcgttgaggatctcttcccagtagaggtggaccggagcctggccgttgccctgaaggcggacgcccctgcggtgaggggaaagcaaggtgcgaatgtggtcagcccgcgagaagagacccacttcgagggcgaggcaacgaggacgcacttctccatcagcgagccgatgttaaacgcgttcgtgtacgatgaataggccgcaatgagcccgatccggccgcgcttgcggacggccttgatgcactcgttgaccgtctcagagacgtcggtctcgagcatcagcgctttctgaaccttgtggaacatcgtctttggggtgtgaaatgaggcggcgttgatagcgacgtccaggccgtcggggaagagcttgagcaggccgacggcgacgtcaacgccgcccgaggcgtcaaagacctcaatgccgagcttctccttagcgtacgcgatccgcgaggggtccgtgtcgataccgatgacccgcttggcgcccttgatctgcgaccacttggcgacgcagactgtcgagggaaagttgagtcagcggaggcgaaggagtggccgaggggctgacagcgaaactcacgcccaatgggtccgagaccccaaacgccgacagtctcgcagtcatcctccccgacacccgtgtcgacaacggcgtggtacgaggtcggaagcacgtcagagagatacagcgcctgctcgtcggcgacgtcgtccgggatcttgagcaggttgacgttgccgtaagggaccttgacgtactcgccctgacctccggggaagccgccggtgaaatgcgagtagccgctgcatggtcgagaaagagtcagcaagactaaaggtcaaacaggcaagagcagggacgtacaagaagccggcgtcgcgctggccgtacatcgtctgcatcagcgacgaattgttctggaacggtgaaagacgatcggctcagcggtcagcgctcgttccctcgaccgtcagacgacagctagaggagtgacgcaccgtccggtcgcagaaggagctcagcttcttcttgcaccacttgcactcgccgcaggcaatctggaacgaggcgacgacgcggtcgccaatctcaaggttagtgacgcccttgcccttcttctcgacgacgcccatgaacctgagaggaggcacttgtattaggcgctcgcacgcaaagtggcagctgggaaagaaaggacgtactcgtggccgaggatgtcgccctgctgcatggtgacgatctcgccgtgataaaggtgcaggtccgagccgcagatggtgctgcctgcgaggcgagggccgaaaggagtcagccgagctgcacgcctcgcgcgagttaagcgccagcctggctaaaagccgacctgctcggagccagccagctgaagcccggccagctcgaggtcgaccggcctagggctgtgaggaggaggcgagacgcaccagtgaccttgagaatgacgtccttgtcttcggtaatgtcgggcactggagcgtcgacaacctcgaccttgttcgtagcctgtgaaggcagacgagcgagcgcagggtcagctgaggaaagcaggcctgcgaggcaagaaggggcggcagacgcacctgccagacgagggccttcatcgtcgagccatcgggccggtgcttgtactcggggttcgccgcctggtcgatctcgacgggaccgccgagaaccttgtcctggagaaagttggaagcggcttgcatggttgcgagggtaagagaggaagagacgtgggtcgaggaaggtgggtgttcagaaggaaaggaggaggcgacgaagggagcttgcaagctctctcatcgccctgcgaatgggcgccacgcgcggccggctcgcgcggaaaccgactcccggaaggagtgaaggcgctaaatcgaccgacccacctacgtcatcgagcgcagcccgaccagcagctttcggcagaacgcacgcatcgtcgcctctgcccaaccgagcccgaatcgatccgattccaatgcctgtctatcgatacagttccgggcgcgcgcgcctcgaggcgctgctgcctctcttcctttcgcgactagaagtgctggtcaagcacccgatcgaggttgaagacggttgagatgagcgtctattgcgtgtgtgagagaggcagtcagcaagggcagcagccggtacgtatggagcagaggggacgcacaacggccgagaagccctggggcgtgttgccgagcccgcggccggagatcgaaatctcctccgactgcagagggaacggcgctgatcagaagaggctcgcacgacaaagggcccacctgccagtgactcacaaacaggccgacgtggttgccgtagccgaggagatcctcaagcatggccgtcgccttgggcaggagctcgggctcgtacgcgcccgctcgggcgagcgcctcgatcgcccagagcgtgcagagcgtgaaggagccttcgctcccgccgaggccgtcgtcgaccttgctagtgtcgtagcgcgagatgagctgccaggtagaaagtagaggcgctgtcagcaagaggtgtgatgcttgctgacggccggcggcgagacatacgttgttccgctgcaggccgcctttctcgggcggcgacaagatgcggtcgagcgtcttgcggaagcgcgggtcggcggcgctgatgaagaagcactggaaggcaggtgagtaagatggcagatcgtcagtgaaagacgtaaagcctcggccagagggcaagccactcacaagaggcataatgaggacggccgagtcggcaatgtcctggccctcgtagctctgcgggaagaactcgagctcctgattccagcccttgtccataacctcctctacaaaatgaaattgtttgatcagcgctgcaagagggatggagcaactgaggccgacgacgagcgtaccgtaaatggcatcgcgggcggccagccaagacgagcgctgcttagccgacagcggaaggctgcgtttgtccgacagccggagaccgcggtcgattgcgacccagaccatgaccttgctgtagaggtaattctgggaggcggttcgagcttgtcagtcttcgggtcgggggggaaagacgaaaagagactcgaggcgccgcacctgcttctgcgatcgtacctccctgagtaaataagggaaaagaatgtcaataatggtagctccaaaggcagcccgcgcgaggaacgcaccagatgctgaggtcgggctgatcgtagttggcgacgacccagtcgaccgtccgccgcacggcccgccacttgtcgaaagaaatgggcgacgagtactctgcgggacaagcgggttgaacaaggtcagcgagcaagcagatggcgcctcagtcgaaagatgaagagactgactttgagcaaggtagacggcatcgagcaactcgccgtaaatgtcgagttggaggtgatcgacggcggcgttgccgatccggaccggcttcgagtccttgtggccagcgaggtgatcgaggacctcctctggcgcctccttgccgccgtgaatggtgtacctgatcagagacgagaggtgtcagcagcgcagctttcacggcgagacccgaggacgaacatgatctgcagcgacccgtcggcattctgcatcagggcgaagcagcggcaacgtcagtcgcttgtgctgcgtcggcgcagggaaaaagacgacccgcacatcatggtcgacgacgccgtgaatgaagtccatgtacgcgtttgcctcatcaacaaagccgagccggatgagcgcgtagagcgtgaacgactgcagcaggaaggggttcaggagacagtcagttaacatcggcggggtcgacggccgtggatcgactcaccgaatctcggatccaggtgaagcggtaatcgtagctgcagcaaggcgatgtcagcggtatcttgcatcgagaggtccatagtcacgcgtgcgactcacttgcgctcgccaccaatctcttctggcaggccgaacgaaggcgaggcctgaaccgagcacaccaaaggtcagccgcgccgcgtcaattagggtccgagggatgcagacgaacgatgatggcgccggtctcttcaaagatggtcatcttgagaaagagcgcctgacgaaggactgcgagcgggcgagcacgactgtcaacatctcgccagcgccagggtaacgacgcggcacgcaccgacttctcgccagcggcctcgatatgatgcggatccgatccagtctttccagtacgtgtttgtccgctgcgagacgacacgttttgaggctcagctaggtactgccgtgccggcgggccttggcacgagtcggacgcacctggatgagcgacgagacgagcgaaggcgtgcagacaggatccgagtcgggccggagcttcgagacgcccctggcgagcgtcttgacgtcgaccccaagctcctttgccttctcctcggtgacccgaatcgcaccattctcgcccttgtgagcctcctcggccttctcctcctcacacgagatctcccgaaagacaaagtcgacaacttcaccctggagaacttcgaactctgcaaagactccgaggcccttgtggccctggtccgtgagattgagggcgtgccagtcgacgatcgggccgtcgctcgccgacttctcctggctctgaggcgccgtcacgccggccggatcggcatcgcccgtctgctcctcggcatcgcccgagatgagcgtgcgcaggtcgacagaaagcttcggcgtcgtgaagacaaccctaggcacagcagggcggccctccgccccctgcgactcgtccttgacgatctggagctcgtgcgaatcgcgcgcactgcgagagggcgaaagcgcacggatcagatgccggacgagcgacatgcacctggatctaggcaggcacgtactagtcgaaagcgggcgcaacctcgacgcgaaaggtgatcttgccggcgacgacctcgacccggcgcagcagccacggcaggaaggccttgcccgccttggtcgcgccctttggcacgagcgtgtcggtcagcaggccgacgccgtcctcagagaggaacttggtcgtcaggacgttggaggtcggcgcgtaggcctgcttcgtccgatactggcaggtgggctcaatagagaagtggccgccctaaatcgacgagagttgaaggcaggaggcgggctgcgtcagcgcgaccgcaagcggcggcgaccttacaggatgacggtcgcaccttctcgctgtcgacgatgcgagcgaagatgctgcggaggagtgagaggcgtcagacctctgcgcgcttcgagggcaggcttcggctgagagagcttacgaaggcgagtcaaagtcaggcaggcacatgctctcaatcgagccattcagcgagacgagagcggccgttttgaggttgcctgcgggttggatcgagcccttcagcaacaggccgtgcagtgcgagctctcgccagactcaccgatcatcgcatggtcctgcgacgataggggccgaggtcggaggttagcgtggagctgcgagcgagaggcggctcgccgacggggcaagcgggacgacgcagacgaacggggatattagggaccgtccggctgccctcctttggagggtcgactggagcctggcagatcgtaaggccgggacggaggagggcgtcgaggcggtcaggtcggcccttgctctcgggcggtcgcgacgagcagccgacacggaccatcagagctagattggggagtcgcgcaggccggcaagcaggacagaaggaagaggtcgagaggctgcgaacgtcgtcgaggatagcaggtggcggtcagggagtcgaggaggtcgcccgtcgctcaaaggtgccgctcgtcggtgcgcaccatcggagggagcgtcgtcgacggcgactgccgccgaccggatgcgtcattccggcggccgagcaggggcggcatcgtcctcgtcttttctactcctgcacaggctgcaatgcggaccgcaaggttggcgtcgtcaagatgccagcgcaggcagctgcttggaaagagcaggtcagctggggcgcaggtgagagagccggcgggggcggcacgaccgttcgtcagtggctgcgcacgaagtcctcgccggcggcggagggaagcacgctgagacggacaagagtcggagggctgagtcatggatctaggaaccgggatgtctacatgatgcgcgagggcgagactacaaagtgggggaggcgcttttggaaagggcgcgagaagtacaaacgagggtgcagggagtgagtaaagaccgagaagaccgtaaaaacaagacgaccgcctcgtctagaggacgtaacggaagtcggggttgtggttctcggtgatgttcttcatgccgagctcggccgacttcttaacgtcggccgggccgtactcgcggtcgcggcggcggttctcgcggagcatgtagtagccgaggaggcagtgagcgaccgtcttggcggcgtagccggcgagcatggcgtaggcggccgaccggtagacgggcttctcttcgggaaggacgcagagcgggccgacgatgttgccgacacagtagccgacaaagaccatcgacgaggtgaccgcgcgcttggtgtagccgcccatgttggacgagatcatgacgaggccgagagtgaagccgaccgactggacgttgatgagccaaagtccgacgagccggggccaggtctgtgtgaagggcaggaaggccatgaggcacgagccgaggacgcagatgatgttgccgatcgtgaccatcaggatgcggcagttctcgaacttggtggcgatgacaccggcgatgaggagcgaaatgacctgaagcgaccggccggcgcagtcaaggagggcggcgttgagctccgagaagcccatgcccttaatgagcgggcccgagaagttggtgaggatgccgttagggaccgacgatccgaacatggcgatcgtgatgagccaggccttgagcgagcagagagcctcgatggcctgcttgacctcgaaattcttcgacttgatgccggttccgttggcggcgacacgggcgacagcgagagggcggaactcggccttgagccagcgagcgttggacgggccgtcggcgaggaagaagtaaaggacgaaaccccaggcgacggtgatggagccgaggatgtagaagatgagctgccaacgcttgacgggtccggcgtccgagaggccctgaatgccggcggccatcagagcgccgatcatgccgccccagccgatcgccgagtaccagatggtctgccgaaggggcgcctcggcacgggtgtaccagaagccggtcatgagcgagagaccgggggtgacagcggcctcaaggacaccgaggaagaagcgctgaaagggagggagcgggaggacagagtcaggacgagcgcacgcaggcaggcaggcatgcttgggcgacgcacgttgaccatgatctgagcaaagttgcggttggcgacgatggtgaggaccgagacgccccagaagacacacgaaatgccgaggaccttgccggccgggaagcgaccgaggaagtacgagaagaagggctgggcgaccatgtagccaatgtagaacatcgaggcggcgagcgagtactggttgccgacaaggccgagcgccttgttcatgccaaagaccgaggcgtagttaagggcagtcttgtcgaggtactggagcgtctgcgtcatgaggaagaggggcaggaggaaccaatcgatccggcgcaggatggtcttgttctgctcgggggtctggaagaagaaaagagcagaaggagaagacaaggtcagtgcctgccgactgcagaggggaacagcgcaagaaggtggaagacgcacgatggcggccatcttctgcgactcgtggtaggcggccatgccgacgttggcgccctcatcctcctcgagaatggtgctctggtggtcaatgtgctggacgccggccttctcgtagtcgaggtcggacatctcagagtccttgcgggtgagaggagaagccatcttctgtgtgggtgatgaggagatcaggcacagtcttgcgcaagaaggagctgcgcgggctcgaagcggacttacgatgagagagagctgcaagcaaagaaaggaaaaagagaagaggtggtggagagaaagagtcgacggtgccgacgggaccctcgacctttaagccctcccaccgcccgctgtgcgccgaccgggatcggagcccgcgaaaggtggtcccttctgtcagggcgggggaggtctgagaaagctgcttcctggcggcggcggtccgtgcagcgcgcaaggcggccgagggggtggctgcgtgccaaagggagcctggcccttggcgtttggcgaggtcggctttgacaggggttcgctggcgatggtggcggttggagatcaggacccgccgccccgaccgccggcacgatacgtaccgccggcctcaatgtccgacggttgccgactcgactcctatacccccctagatcatgcaacccgctacgaggcggacgagaagacgctcgaaggagttagcatgctctgtctgcgacccagcatcagcgagggtcagtaggcgccggcgaggctggacagacggcgtttcagtgcttttcggcggtcggcccgcgccgccgggcgacgagagcggcgagatgcggagcgcgcgcgcagtcaattcggacaatatcgggcgggacccccgccaggctaagtgcggggccgttaattttagtctgctccccttgatggtgaacgcgagtcgacgcggtggttcaggcttgtcagtcccggtcagcctctaacacggggcgagatcagcatgcggcgggaagccgcactcggccctctcatctcgcaacgtttcacggtcggcgacgggtcaaatcggcgagaatgccgacgaaagccagagccttcgtcgcttgcgtgtttgcagaagcgctgggagcggccatgaggccactcgcgcaagcagaactcgcgctccgcgtccgagtcgaagctagcagcatcgcagatcgctgcgtccgagctgagagcactttggtcgtcggcaggcggtcgggcgaggcccggctcgtcgggcgcggcgtggagcgaggtggggtcgtcgggctgtcgggcacaagtccggtcgtgcgtcctgcggtgcggggaggcaggagcgactcttacgccagtaagtccttcttcccttccccgccgagggcacttccccgccctcgtcgagtgcgagcgtcgcaaggcgcaagaggaagaaaaggcttggacgtacctgttggcggaaggcgagatggatcgcatgcccttctcctctctcaccattttcctccgccatcaactcgtcagctcctcgtaaacggcccgctcgagacgctccttcatcgccgcaaccgccttggagaaaacgggcaggagctgcgtcgtcaggacgactgcaatgccaacccgctcgtcgatccagtattcggttccggccgcaccagcccagccgacgctgcccgggtgtcgacccccgccggccctctggcctttgccttggtagagacagagcgcagtcgaccagtcgacggcacctaggccgcgctcgacccgaagcatctcgaagatgctggcgttgtggtcctggtccatcgcgccatcgggcagcgtcccgacgaacagcgagtcgatgctctcggccgacaagacaggcgacgtcatacgacgcgtcctgcaggcgagcaggtgcgacaagagcgacacgtagtcggccgtcgtcgagtagatgccgccgcctgcgacgggatactcgatctcggagcgactgcgagacgacgattgaagcggtcagtcgcagccctccatccttaacgcaatgctctcctcgtccccttactcacacccttggcaacatcagtcccggatcctggccgacgagttcctggtactcggccgagccgtcgacgttctcctggcgccatcggagcgggacgagtcgcttggcctgttcggcgtcagcgaatgggaagaacgtcgtgttgcgcatctcgagcggccggaagacgtgctgctgcaggaagtcctcgagcggctggccagaggcctcctggacgaggagcccgagccatctgcggaagcacaagcggtgaggcctcagtcgttgcgatcggcagctcgtccaggcacgtcacgagaggtactgactcgtgaccgtttccgtactcccaggtcgtccctggcacgttgcagagcggcgtgttgatgaggtttgcctatgtttgggcgagcagaccggcccttttgcatcagcgctgacatcggctgacaactgaccaaggcatcaagcaaagccggggtaggagcgcgacgtacgagcttgcacgagttgacaaaaccgccgccgacgtctgcctgccgcttccaagcggtgacctttgggccgaactcggcgccgaagccagacgtctgcgccgagcaaggtcaagatcagcgccggctctggatcgacagcgctgatccgcacgctgacctggttcatcagcatcaggacggtgatctcgacgtcggtcgagccgtagaccggcctgcccgactgctcatcaacgcgcgcgatgtagcgcagcggcgtcgtcagctggggcaggtacttcgacgcaggcgtgtcgagcgcgaggacgccctggtcgatcagccggagtgctgcgatctggagacggaaggagcgagggccaggtcagcaagcttgtcgtcgactgcccgagcaggtgcgtgcggtcaaggctagcgcctcctccgtcgagtccccaggacgacggggtagggcgactgaccgaggtgagaagcttggtcgtgctcgcaaaccagcagatcgagtcggcgctgatgccaggtccggcagggtcgaggacgtcaaacctgccggcttgggcgtggaggagcgggccatcgacggtggagatggccagcgagagggagttgtcgccgagcgcctgcgcctcggcgcggacggaatcgagtagccgagctcgcgaggcggcgctgagcgacggcatggcgggcaggcaaccggaaagcggcgattaaggatgtgcttctgtctgcttttgttgtatctgcggaaggatcgctcgatgggcgactagtaggtccgtaggagggtcgcgacgcctgcgggcacgagcgagctcaacaatcttcggacgcgttcgcccggtcggccctcgtccggccgaattgtgggaagacagccgggagtgcagctcgctggcactgccttcgtcgcccaaccctcgcagcaaaactgctgccgacgaccatttcgctgctgacctgaccgacgacccggctccgatgggactttgctctgccgacccgagcgggcgggcgcggcgccccttgaaagagttgcggaggcgacgcgacggtggcagctcgtgccggcggcaacggccgcagctgctgtctctttctccgagcggcctacgactgcgggcctgcagctgcatcctcgccgccgcctactgaccgcgtccagcaacgtgctgctcacaggcacccttactgaccgcgagccttgatcagggccgaccgtcatgcggcaagccggcatggcgccggccgcccgtttcgtcgccgccctgctcgcgcctttgagtcgccgccgggctggccgcccgcggcatcttctgaagcgtcgagcgccatgagcgagaatggctatgactcgactgacggctagtcaagaagatcgcctgccgggaatcaagaaggctgagcgtcggccagctttgctgcgacctgatccctaccctcatccttcctgaccttgacttgagcaccgtcagtctcacgcgcccttcccaatgcgccgcttcctaatggtgcggccgaggttgacttgctttcgctcgtatagcagcatgtcgagtcttccctcttactctttcttgcccgagcccttcccatcggtcactcctccgcacggtgccgaggtcgaggccgccctcccgcacgtcgcggtctcaaccgatggcttcctccggcgctgctcgaccgtcgagatcctcaaacgacacctcgcccacatgacggcagccgtcaccgctcttcggctgtcaaaaacctctgtcgccttctgcctctcggagcagacgaccttcatccggccgccttggtcgcgcgaccggcagacgagcgaggcgttcgcagtcaaggacggcatgggcgtacgtctttctcctctcctccacgaactcgcctgacggccattccagtctgacattgcctttggattgcagggctcggttaagggcttcctcaacgtcgtctcaacctcgcaccgtctcgtccaggacgtccgcgtcacgctgacggccgtgcaaagcgttgccttcccaggcggcggctaccgcgagtcggaagtcttccggcgcgagctgtcgctcgttgaaatgacgggcagcggtctcgtcgagctacagcgcggcgtcaactggtgcgttggccactcggaggcctgacagtcacctcgtcctccagactgacaacctgcgccgttctgcttcagctttgagtttgccctcctcatgccctcatcagccccgatctcggtccagtcgtcttacggtcgagtgcgctactcgcttcgggccgaggtcccgggttcaggcacgttcctgaagagccggctatcgtgcgagcgggagatgacgatcgtcggcctgcccgagcgttcagaggaggaaggtgagatcagaagacagtccaaaaggcgtgaccatcgctgactgtgtctcctttccaacagaaacgcgcctcgaaatcgaggaacagagcaacggggactggtcgggccaggcgcggctcgagatgtatacaaacgtacgaccgtcacttgcgatccaagctggagcattacgatgactgacgctcgctgcgcctcgtcgacggcccttcacagcgactgacgatcggcctgccgctctcgtgcaagctgactctcgccgctccgccgcaaggcctcaccgttttcggcatccacgtctacctcgtccagacagttagactctgctcgatctctggccgagccgagtcggtcgagagcccacggcagacgatcgtccaggctggctacctcgaggactggcagcagccggactttgttgatcgcgcaaagatcgagcaccgggctcagctgctctgtgacgggtcggtccagggtggcagcaagggcgacgtccggcaatgggcagccgagggcgttttggtgcgtccgtcttcgatgaggctgaacgctcgagtctcagaggttctgctgaccgtcctctcgtccctcctcagccagtcaacagcttcctccgcccgacaacgctctacgtcattgaagactcgcccggcctgacgttctcgcacgagctcgtcttcgacgtcttctttcaatggccagggtccgggcccgacgcggacgaccgactgatgatcgcgaccatgtacaaacgggacgtaaccgtcgctaggtcagtcgtcccgttcctgatcaggctgcccatcatcgcttctgctgacagcccaaatacataccccttccacagctcggtctgcaaactcgaggcgcttacgctacctgcgtactcggagagcacgaccgagtgacagcaagcagcagctcaagccccttcttttgtatgcccttcttcgccttattctgcaggcaatcgccttctaatctcgttgtatcaatgccgcacgctctcctcccgcgatgcacaagcctgctgctggcagggtgcgatcttttcttgcacgacgtctcgacaaggcgaggcggtgtcgcacggtcgcggcctcgtaccccgcttcagtcatcctcgccggtccttcggcgagctccctggacgaagctgtccgaccgtcgcggttcccaattggtaagtagtgcgggggtggccctgcccatgctttgctgtcgtcgtcggtggggtcgtcgtgcactgccagctgtaggctcggcttcgctgggccactggggctccggattcgcggcttctgcgccggcgaccggcgaaccgcctcgcgtcctgcgaacaggccttgcttgctcatccgaccctctccctccctgctcgctcgcactctgggaaaaggactagcgaaacctccaactctctacccctcacacactcacccatcgcctcgcgccccgccatgacgctcgttacgcccgcccggtccttcctcgccggcctcctcctcctcgtccccgtccatctctcacccgacctcaccggctcgccctacggcatctcgggtgccctccatcgctcggtcacaagcggcgcgcgctcgtggacggcggtcgccggcacgggcggtctcctcgttggcggcgccatcattggctggctgctgcccgggcccgaggttgtccgctacgagatcaccaagacctcgctgcagtggatgcgctgggtcgtcagcggcctgctcgtcggcgccggcagcaagctcgccaacggctgcacatcgtgagtctctgcgtgctgagttgactctttgctcggagctgtatggctcctgacgccgaccttccttccggggctgtgccttgcgcccctttagcggtcacatgctctctggcctgacccgcctctcgccccggtcgctcgttgcgacggccctcttcttcgtcttcggcggcctgacggcctcgctcttcccggacctcgctgcggccaactcgtgggcgtcgccggccgtctgggactggtcggtcggcccgcgcgggtggttcctgacgtcgaccgccctcttcgccgccgtcggtgcgacgatcccgtccaagctcgagctgtcgcggaccgtcatgccggcgttcttgctctcgctctcgtttggcttttcgctcgccaactcgggcatgctctcgccttcgacgatcctcgccttcctgacgccgttcggcgccactacggcttggaacccgtcgctcctcttccttgccggcgttctcccgctctcggtcctcttttacaagggctccaagccggcgcgcgaccgcgagtgggccgagcccgagctctggatcggcgccgccctatttggcgtcggttgggggctcagcggcgtctgccccggccctgcgctcgtcaacctcggcacttcgatcgcgttggacgtcggcgtccggtggtgggcggcctgggtcggcgcgagcgtcgccggcggaaagctcgccgggctgatgatgtgacggccggaatgccgcgtacctgcttcttctcatgtcgttgtcgatacaatctcaccagccgccagggcgctctgagggtcaggcgcaacctgtcctgtacccctgtcacacgacggcgctgatagctgggctgcgtgcgtgtgcaagctattcggacaccggacgctcagcagcacgtcggcgccaccgcgcgtcgtcgtcgctcgcagacgaacaccgccagcgcgagcagctcgcccgcgacccttcgacacccatccggcctgcctcgcacttcctcagccgacactcagcctcttcgctttttcaacctctccgatttcgccctctccgagccgaccgacccgtcaactccagccatgcgcgtcatctctgccgacatctggtcactcgtcctccggcttgtcgccgagcccctcttgcagcttgaggacgactctttcctcggtgacgactaccgcgactagagctacagcatctgggacgtcgagaaagggctcctcccatgcatgcccgtcaaccggctcttctacgtgtgtatgggcgctcgcttgacctcgtcagcactcgagctcaccaccgacgccccctctcttgccctcctgctgcgcacgcaccccttgaccgcctggaccgtcgctaggaaattggccgcccgctcgtccaccacaccatccgcggcgcccaattggccgcgttcagcactgaagacgaggcggaggatgagcgctggtatggcctcacgagctcgcctcgatccgggtcgctggctgcctgagcaagctcgacgagcggcccgacctccgccccttcgtccgggccatcactctccgcgagggtcggtcgtacgacctcgacgtctggagataaattcgcgtatttcccaatctcgaccacgtccggattcaccacagctgcctcttcaatccatccgagtcggttcttttcgccccggtccggctcgacctgatgctcgaggacgaggagcagggtccgaacgggtcctggttgactgcgctcatgtccggcccgttcaccaagccgtcgatgtcgcaggtcgtcgacctgtctcacgtttcttgctgccccaatttccccgccatgcctacgtccttccacccgaccaccgtcacgccgcctttcgcttcccattcaccgccttctgctcaccttcatgccatctacgacccgtcccgcggcttgcgctcgcgcatcacgttccgatcaaacatgcgctcttcaatcatggcgaccacaggcgatcgcgagcctgttgcaacgagagcatatcagcgacttttgggtgacctgtcatttgcgagcgagcggtcgacgaaccttgcgcgcgagagcctccgttacaggcttgccgtctcgaccaggcgcctgcatgatccttgcaagaaacgtcgcctcctgaagcaaagcgtagctcgagtcgtcagtcgttgcgcgagatcagtcagagggtggaagaaacgtacgcccatgcccacaacgtctttgccgcggagtcgctccgggaacacgcgctcgccatcaatcgtcgcaaactcttgctcaaaaagtcgaggagctcgtgatgcgtccatgccgaaggatcgcgggcgacgagccggccgtgcagcacgtaaggctggctcttgaccttggagtcgactgcggaaagaggttaaattgctgctcctcgccaggcgctccgacagaactgaccggtcgccttccagagatgcagatagaacgccttggccgcagatgccgtcaagtttgcgccgggacggacagcgctcaagcagcgggcgatgaagtccttctccgagaggcttgacatgaagaggcccgtctcgccgttcggagcaagccctgagggccagaattatcaggggccgtcggcaataggagccgtgacattgaatggctcagcagtactcacgatcgggatcgaccttcttgctttcccgcgcgacccacgccttgaactgctcgcttgtccatgagcttggctttcgatcggcggcatcgtcgacgagtctcatcggcgtgattcggaagggcgcgcagtagttgagcgtgttctgcgagtgggcagcgtctacggtcgagggccaagaaggacaggtcaaactaggtgatgacgactgaacgccatcagagactgaccttgcggatgaggcgaggctggtatgaagaagggtcttacgtcaggctcaagagggacggcgaggttcgtttgacgcaccatggccgacgacgatcatatgacacgcctgggtcgactcgaggtcaaagacaggctaccggagaggaagccaacgagatcagcattgaagagcgaccgccattgtgacccgcgtgctagagcacaccttgagagccaatgtgagttttgaaaccgcggtagggtacatgaacgaatgtactctttgctcgctgctggtcgctgtacggtggaggtcaagcgaacagtcttgtcagcctgaacgagagcgacttggcggggagcgaccgacacgcacaccatcgagcaagcgcggacgcagtccttgagcgtcatcaggctctcgttgatgagacggccttcatcgagtcgattgccatcacttccggcgcgggcggctgcacgttcgctaccggcgaggtcgacgatgacgagccggcccggaattgccgtcgggaagaatgtgttggtgacgaggacggtcgtcagcgcattcgaacgcgacgagacgtcgttcttggtcgtcgactgtgtccgcgggctgcagcggcacggtcgatgaggtcgagcagctcctctgatgtcgacgcgcggtgccgagatgtcgagatctcgatcaggccgtgctgagaagggcaacagtgagctggtcagcgagcccgactgacaggagtctctcagctacacaacgcacccgattctcggcgatctctactcttcggcccctctcctcgccctcgtcacgctcaagaaggtcccacgactccttcccaaggatctcaatcgcctcgagctcaatccggaagacgccctcaggttggtgtgccgcgagcggaaagtgtgcgcgcacaaaactggcagcggcagtgaagaggctggcagcgattttgtgctcgagaccttgaatcgtatgcgttcgtgagtgcaaagagcgtcaggcgttcagcacggcgctgtcgccgcagcaactcggcagcgagacgcaccttgccgctcccggtttgcccaaaggcaatgcaggcactgactccaccgtccagagctgtctcgagaacctgcgagtaatgcgtggagggtcgtcaacgatggctcgaagaaggtcaccccgtcgacagtctcgccgccgagccgggcccgactcgaagacgctgctgcgcacctggcgtccctcgaagagctcccggaagacgtcctcgttcgtgtgctcgggcccaaagacatgatcgagctcgaacggcttcctctcgatctggacgcctgtccactgtcggcccgaagggaaggttgaggccgtggtttcagtcttggcggccgagagagggaagtcgtgttgacggacgaccggcggcgctgaccttgctgaccggcagatggcagacgatggtctgtccgccctcggtcgtcacgcctcgcggtcggtccggtgtttgacctccattcttctgctcctctgtcgagccctcggcggcttgcggcggaggggctggctcagaggcgaggaagggacgcgtccgagccgcgacgacgacgagctgggcggctgcggccgaaacgaggacgatggccatcgtctgctcgggctgaagcagagcaagggagcagtcaaggtcagacaccctgccttttgggcgttcgggaacagacgcacgtcaaaggacagacgacgcgagctggggcagctcggagggatggccgttgatggcgaggttggccagagacgagcagccggacaaagggcggtcagccttcaagccacaccatcatctcatcgacacgacgccccctatccccccagcctgctgctctgggcggcctcggcgacagcaagcaagctgcacgtagaaggcgggcgaaggatgaatcaatgtcattcgagagcctcaagagagggcacacggcgtagggccggccttatggggtgcgaatcgtgtgaaggaggaaggggggtccaagagcggcacaaaggccctagcgctgggagctgcccacctggccgacgctgccgaacgttcaaccgccagaggcaggttgattcgacaaagaaggcagggaggtttgctctggctggtgcgaggcggcttggtcaaaggggaaggaggggaaaagaagtagagctggcgatggggaggacgattgggaggagctgtagaaagaagccgcttggtcagtgacggcagtgggaagtcaagcagatacgtagatgatggaccaacatttgagggtggtggacggtcaagaaggaaagagaattgggctggagcctaggacccccgtgatccccatgcaacccagcccctcagaggaggaggctggcgtcgggaggaaaaggcgggtgatgggcgtccgtcccgcagagaagagcgagaaacacgttcgaaatcgagcgccgaccttcggccggtgaggctggaggccgactcggattcgatgcggaggcgtcgaggcgagaagagcacgaagcgaggaggtagcgaggaggggaggaaagacggccgaaggccaggtagagaagacagagaaggagaggcggacgcgggcgtcctctctgcaaccttggctcctctaaaggtcgtttggtcaattccttccgtttccacgctctcgctcgtgtattctgccgtacgcctaggtttacggtagtctgcgagacaggttcaggttggttgtgggttgttgtgttcgttcgaaagcaagcgctcggccgtccgacggattcgggtcggcgtctgacggatgatgcaaaggttgacgtcagaaggcggacaacggaagggtcaagacggcaggaagatggtcgcacctgcgcggacgatgaagaacaccttcaggtcctatcggcatgagccgcgctcttaggcggccgaagagacgccccggatggagcgcttcttggcacgctgagcggcggtgtgcttcgaggcctgagcataagatgatgaggcggtcgacgagccagacattgactgcgagtcgccagcaaggccgaggtcgtcgccgacgtcttgaggcgagcagaaagcaaggggacgggcgtgagcgtagcgctccttgaaccgtccagcagacggcagcgtcgacgactcaccctggtggatgccgacccggtgacgctcgaggtcgtggctgcgtgagaagccgcgggcgcaccccgcatgcgggcacgtgaacggctttggccggttctggtcgtgcgtcgccatgtggctcttgaggttgaaggcgcgggcaaagccccgggcgcagacggcgcagacgtggcgcttcttgggttcgcggaggttgaccgactggttccaggcaaagtgggcggcctcagccttggcgagctcggcctgagtcggctgcttggccggagtgctggcgggcggcgacacgtccgacgagccaccagttgaagcaggcgaggccgacgagtagcccgacacggcgtccgccgggagcgcgttgaagacgtagggcacggttccgacgctggacgaggcgaccggtgacagcgcatcgtcaggaccgggcggatcgaagcaacaggcgagatcgagaaaggagacgcactcgttgaacgactgctgctgctgctgctgctgctgtgtcgtaggcataccggcagcaaacgagccgccgagagagacggccggcgagaagccgaaaaggtccttaaactcgaggccttcggtcccgccgcccgatggcgcaaggtcgaacgggtcgccagtcgacgcggtcttcgagtagacggtcggcgggccgccgaaagagccctgggtgagaccgctgctgctgcgggccgtcgaggacgagagtgaagcgaccgagaggagcggcgacgaggccgccgaatcacccgaggacgagcacgtccggggcgtcgtcacaggcggcgagagggcggcggcaacgaaggccgaggcggacgaggtgttggacaggccgtacgacgaggcgccggccgccggccgctggaacgccggcgtcgggcggttcgagccgaagtggagcattggctgctgcatcaggccgaaggcttgctgctgctgctgctgctgctgctgctgctggaaggcgagcgactggagagccgcgccgtagaacgactgctgctgctgctgctgctgccagcctccaagcggccacgcttgctgcagctgctgctgaggcggctggccgctctgaagcaggagagcttcaatcgcccgcgcctggcgccacgcgaggccgtcgtcgatgccgccagctccagaagcggccgctctggcaacagccgcagcctggtagtcggccgcggcctgctgggaggagaagacgatggaggccgcgccggaaagatacgcagagatcgctgcatgggcgattgcggtcgaagagagggcggcgccgggcggggcggggggaggcggcttgtgctggtggccgcccgagcgatggaaggcgtcctgctggccatccagggccgacgatggctggtgagaggctgcctgtgatggctgagcgagggcgtgtagcatctgcggcgtaaagtgtggtggaagcgacatggtacgaggggggaagttgacggtgggaggggaagaaacgtctcgagccgcttgctgctcagcccgccggccggtctgtcgcccgccccctcttgcgcagcagaacgttcggcccggaccaaacaccccgtcgttccatcggcctaatttctcaatccgacccgctgatcctggatcgggacgcaccagccgagagtcaggaagagctgcagggcagagcgcctgcggcacaggcagtcatacaagtcgttcacagggatgtctgccagggctggccggtccctccgacagccatacccttgatcgaacacggcgccgcctccacttctatattggtcagatccggcagaagcctcctgccgtcggtcacggacgacgactgcgggcttgtgcaaagagaagagaggagcaagtcgaagcaccgaccgtgcctgacgcaagactttcgccgacgtcgcgcaggccggccgacgtgcgcagaggctgtcgtccttttgaaagatggcagatgcgcgacctcctgcccaagagagggctgcttctagcatgggctacaacagcattcttctatgttggagatggggcagggacaagttgatgaggagagagtgcccgagggccgacgaaggttgcaggggtcgggccgcgcaagcgcgccggatgaagtcgagtggggaaagttgacagcagccggtcgagtcctgtggtgaagcagggttaacgttcccgggccaatcctgccttccgaggggttcgcctcggctcgaactcggcaccgaggaccacttctggcgctctagttgcggggcgagatgacggcaataaccgactcgtagacgtagaacacgataccgccagacatctgcagcgggaattagctatcagcttctcgtcgacagaaaaaggtagggcgagcgaccagaggagaagggcggaactaacgctgagccgggcgagtcgagggacagagcctttccaaagcgtcgcgacgccctcctccttgacaatccgccagccgcagtggaaaaggttcttgtactcctgcttggccgagagcgactgcatccgcgtcttaatgacatcgaacggcatcgttgcatctggggaacaggggcagccatctaggtcagttctttgtgcctgtcatggcggtcgtcagaaggtccaagagcgcatggcgaagcagacgcacagacggtgacgacaccggcgacggcaccgaggccaaaggtgacacctccgggcaggggctggccggccggagctgagccctggacgagctgcttgaggctcgagtaggtcgtgaagcggacggccgagttggcgccctgcttgaggatctggaataatgcaacacagaggcaggagcgatcagtgacggctgcgcgtgtcgatgtagaggaggtaggcagggcacgcacgacggcgctcaggccgcggtagatgccgaggaagccctcggccttgacgatctccttggtgccatggatcataccgcggtactggggtaccgcccgtcgcgagtcctcgacaagcttggtcctgtatcggtggacgagcgagaagggcaacggctatcagtaagtgagcgacgcaaggagtactgcgggacagcacggcggcaaggaaaggttcgcacttgatcgtctcggacggggtaacggcgacgatagcctcggacatgcctgcgccaagtccggctgcgggcgatagggaggtggagcggtcagcgcagactcgccgtgcaggcgcaggcgagcagcgacgtaccgaggagactccgcggggcagtcagcttgccctgcaggaggtcgtccaacggcggcaggtcagcactcggtacccagcgtgggtgactacatctgcagtctgcttgggccgcacctcagagtcgtgcagcaggctcttgaagtagtcgtacgagaggaaacggacgcctgccttgacggcgttgccgacgacgagcgcgctgcagcccttgtagaggccggcgacgccgcgctgagcgaccgtcgtcttgatgatctcgatcgggcccggcggctgcgagcagcggagccgacgcaggaaagcaaagtcagcagtcgtagagggtcgacgatctcgagcagcgtctggctgctcgctagaggacgcaccttgccgccctggctgccgtggaactggacctgggtcttgacaaagtcggccgggtaggtgacgaaaccctcgacggcgccggcaacggtgcccgacgtgagtgaagcccaaagcggttcagacttcttcgcagaggacgacatcgaaagaggaagcgcgagactggggaggaggaggaggtcgtcgttcggcggaggagagcgagcgcgcgcgagaagtgacgacggcgacgaagccgcccttaacagtcgttcgcctcaatctttcgggctcggtgagccgtagtccggccgacggctgcccgattaaggcaggcagcaaggccttcctgcgagagaagtaggaccgggtttatataggaggcactgccccagagcgagtggtgtcaatctgagcgagtggtgtcaagtcgaagcgcggggacctcggccgacgcgccgacggaggtcaggtcgaccatcgacggcatggctctccggctgagtttcatcaagctgccagctagagatgggtctgagagctgccctcctgtgtaagcaagggcttgctcgtcgagatatgaggcgaacgagggtcttatgcctgcagcgcggcgcgacgtgcgacggccaacgcgtccgacgagggcgctcggttcgagctcgggccggagcgacatcgctctgcccttcagacgacgagcatcgcaacgactagccctcgccatccgcaaggtcagactcacaaggggacgtcagatccctatagacctgatcgcaaatatcgtccactgcccaggcacttgatgtcggacccgccgtcgccgacgttcgcagcagccggctcgcaggagcttcgtccgtccctgctcgtcgtcgatctcacctaccgatcaaacttgagctgacatctactacgctgtcgccagtccgctcgcatcagcgcgacgaggagacgcaaattcgtctgacgggcctaacgagaaatgttgcccagtcggtcctcggtgcggcctgtcccgcagctcgtctcgccagcccgacgcctgatgctgaccgacgctctgacccgacccgttcgcaggcgagcggtcgctcctcgacaaaggtcctatcctcgagatcgtcgggtcgctggcctactatggattgacgttcggtcgaggtgcggctgctcgctcacttgcttgtcggccgtgccctgcgcgatgccccgacgaccgcaacctgacgtcgccatcttcctttccctcgccttgctgaaggctcgcagacactcggcgaggagtacgtcgacgtcctgccggtcacagactttggctcacgcctttcggtcgcgagctctagggtgcgtcctcccctgcccagctcgactcgtgccttccggctgaagagtacttgcgcgtgcctgcatgcagcgccggcggctcgcacttctctatacgatcctcatccctcacggcctgccttatctcgcgcgatatttgcgctcgctttcggtctttgccgagccgccagaaccggacgacagtctcgcgaccgacgagcgccgaccccccgggtctcgccgtgcgctggcggccggcgcgagagccgcactcgacgcactcgtcgactcggccgttttggcccagctcgcgagcgagctcggcctcgcgctcttcttcctccgaggtggccctctcgaatggggcaagcggctggccggtatccgttacgtacgtcgccgcctccgtttcattgcaacctctcagcccctggctgacttttagccccccccccccccctctcgctgcagatctccacgctacctccgccagaggatgagcagcgctccagtcctcggtaccgtatcctcggcgtgctactcctcttcccgatcctccgtcggcttctcggcctcatccggccccgacctccgctgcagtcggccgacgctgtcgccgccagcagcgcgtcggacaagggtctcgctccagctcggtcacccttcaccctaccatcaggtccgcttcctctcagcccggacgcggcgtcggaaccgacggtagccttcgacccgctacccgccgacgccaccgagcgcgagcgcgacgcgcgcaagtgcaccctctgcctcgagccgtgggcagcgccgacggtgaccgagtgtggtcacgtcttctgctggtcgtgcatcgtcggctggagcgccgagaaagtgcggactccttcgctcgtcggcgcagacaagtggctgctgacccgctcctacctttgcaggaggagtgccctctctgccgccaggagctcaacccaagcaggctccagcccgtctacaacctgtgatccaaggggcttgactcaagcagacgtgcagctacggcaccgccgagactccaaggccgccagtctgcgccttgaatcgagagcatcgccctttcgcagtaggcggccaggtgtcggttcgtaaaggaggcatggaatggcaaaggcagcgtgggatgcggagcggtgcgaaagagcgaagaaggagggccgcgaggcggcaagcaattggcgaacaacaggggcagaaatgcagggaggaaagatgcagcaggaggaagaccaagggaaggcaaaggagagaaatctagaaggaggcgtttctacttggtgagggtgaggacccagagggcgttgctgccaccacactgctggagctgctggcccgcgcaaggcatgtcgcactgggtggactttgcggcggtcgcaatgttgacggtcgacgagctggcgcagaagcactctgagggaggggagaagcaggtcagcactgagggtcggaggggggagcaggagagcagacgcacccgttccatactcgacgccggcaatgtcgaggccctgcttgccacagaagtcgctgcagacgccctgggtcatcgtctgactcgaggtcgtcgggccgttgaagagccgaccgttctggttgtcgaggaggcagagccgctcctccttccagccattggtgagcgtcgacggggtctggtcggcggccgtcgccttgtaaatgttgagcgcctgaggtccgccgcacgtcttggaagcgtcgcccgagcagtctgtgaattcaagggggcgggggtcagtctgggcgcactgtcaacgaaggcaaggagagaaaggaccgacccatgttgcactggttcgaagggttggagaccgagatgacgttgtcgcagtagcactctgcaggagaagaagagggagggtcagctgctgggcaggctcgctcgaagtagagcagaacgcagacgcaccagatccgtactcgacgccggcgtaggtgtagccgaggttggcgcagtaggacgagcaggcgccgggggtcatctggttcgaggtgaacttggggcccttgaggagccgctggtcaatctcggcgatgcaggcgccgttgacgaagccgcttccagtcgaaggggcgccgccagaggcagccggagcagcggccgagaccgaggtcgtggcggcaggagcgggcgagcccgaaccagggatgacgttcagggcggcgtcgaggagggccgagttgcggtagagctggaggccggcagcgccgccgcaggtgagggtctggctgttggggcagagcttgggcgcgttggtggtcgtcatgctgagcgaaccgccgttgacgagcgagttgccgcagaagcctgagaaagcgcatgtgaaacaaagtcagcagcctgaccacaatatcgagagagagaagggagaagaacgcacactcggagccgttctcgaggccggcaagggcgaagccgcgggtcgcgcactcgttggtgcagaaggcagccgacatgcgggtctcgtccgagccctgcgagccggtcaggacacgggtgccggactggacgaggtcagaaacgagcgaggtcgaggcgaggacccagcccgaggtgacgggaccagagacgatgccagcagcggaggggccggcggcggcggcagccgacgtcttggagaccgaagcgatagacgcctgcgagaccgaggcgaccgaggcctgcgaggcggcagcagcagcgttagaagcagcggcggcgttggaggcggcggcggcgttggacgcagctgcggcgaccgaagcaaaggaagccttcgaggcggcagcggcgttcgaagcgacggcagcgttcgaggcaacagcggcgttggaggcgaccgaggcaaccgaggcaacagaaacgaccgaggccttggaggcaacggcagcggcgttagaggcgacggcggcgttggaggcggcagcggcgttggaagcgacggaagcgacggaagcggccgaagccttggacaccgaagcgaccgaggcctgcgaggcggcgacaacgttcgaggcggcggcggcagcgttggaagcgaccgaagcgaccgaggccttggagacggccgcctgcgactggagggcgaccgaggcggtcgaagcccgcgagaccgaggcctgcgaggccgtgttggccgcgcagtcggcgttggccttgccgatgcactggttgtactggtcggtgcagtcgttgtagtcgaagccccaccagttccaccaggtccaggtgacggcggcgttgcaaagggtccgctgcgagttgcacgagtatgacagggcggcgaacaggtcgttgaaggtctggccctcgcacgtgtagcggtacgactggtaggtgtagacagaagagcagtacttgccgccgagcgcgccctcccagttctgccagtcgtagccgctggagacgaggacggccttggtggccgtagcggcggcggcagcgaccgaggtgcggctgacggagctggtgtagtgggaagaggaggaggtcaggggctgagcgaagaaagaagagatgatcgcttgggctgccactcacgcgaccgaggcgaccgaggcaaccgacttgaccgagacggacgagacagaagcgaccgaggcaaccgaagcggtgtaagcggcagcggcggccgagccgtcgtcgcagctgtagagccagccgcagctgcgagaggccaggacgaagagagcggatcaatattggaacagagggttcgcggtcgagcggaaccgagaggcagacgacgtacaagagaccccaggtgcgcttgtcgagcgcatgctcctgcgaggcaggggcagcgggcgcggcgacggcgaccgaggccagggagagggcgggaagaagaagggcggcacgcatggtgagggtgaggtggttgggaggaaggcggagggtaagagagggcggagggaccccccccagcagccctcctcttccttcttctcatctcgtccgcgcccgcccgagctcgctcgcctcgtcgttgtcatgggcaacggccagtcctcgcccgccgggacacatgcccacccgcccgcggccaacaagctccagacgtcgcaccgcgagcaccacccgcgtcggagcccgtcgcctggcggcgctcagaagcagacgcagcagctcgcgccgggcccgacgccggcgaagtcgcctgctgaaggccggagggggtcgaatgcgagtggtgcaacgacgacgacgacgggcggcgctgcgagcaacagcggcggcggccgcaaaaagtcgctcgagctgcccgacctgacgaggctcaacttcaccgccgccaacgctagctcgacagctgctgctactgctgctgctgctgaggggggaggaggcgccaacggctcgtcaacaacgagctccaacggctcgccggccccagcagcagcagcagcgagcaagccttcggccggctcgcgcggcatccttggccgcaaacggccgtcgcccctcgcgccgaccatcatgacctcgcccctgtcgcccatctcgcccaagcagacgccggcgcacgcgacgagccattcgaccgcttcccaccagcagcaacagcagcagcagcggggggcggagcgggacgggccgtcgcacaacccgtactttcccgccgagccgccggcgccgttgtcggccgaggcctcgccgatcgacatcccctcgacgccaggccaggggacaacgcccggcctgcccgcctacgatcggatgacgtacgctgccgagccgcttgctgctgcccgccgccggtcgagcacgaccgggggagcgcattcgcttcagccgccgccggcgacgaggcatcggccgagtcaacagcagcagcagcaggacgttagccgaaagacgacggcggcgagcgcaaatgccgccgccgccgcttcagcagccgctgctcctccgagcgcgggcgccgtcaagaaggctcggatcgcagacggcccgccggcggtcgtcccgcccgtcgagccccgccaacagcagcagcagcaacagcagcatcggtcgaaacaaccttcggtcgccggcgtcgacgacgacaacacgatccgctcgtcgctcccttcgggcggggacgagttcccgccgggcttcgagccggttgacgggccgcgggggggcgctgcgggaggaggctcgagtcagcagcgcaagacagcggctccgtccgctgaggcggctgcagctggggctgcctcctcagccggtgcggccgcggcgggtggttctggcgggggcatgctcggcctctcgataagcggcaacgtccccgccaccggaggagcagcgacaggctccagccagatggctgctgccgccggcagtggtgccggcctgacgccggttcagccccggcggcgcgaggagacgcttgagctcgaggcggccgaggagggcgtgccgaccatcatcaactggaccggcggcggcaaggaggtctacgtttgcgggacgtttgcgaaaaactggaaggagcggctcaagatgagcaagaggtacggcgagccttcttgcactcacccggctgccgtccgtccggccgcgatgctgacgaggacctgtccttcgctttcgccgcagcacccatgactttacgctcgtcctcaacctccctccgggcccgcaccggctcaagttcatcgtcgacgaaacgtggcggtgctcagacgacctcgccaacgcgaccgacgctgacggctccctcgtcaactacatcgaggtcgagccccggcgcaaggacggcgacggccccggttggtcgtccgagtgggacgcccacctcggcggcgtcgactcggacgacgactcacactggacgaccgagattcccgaggcgctcgtccgggcccaggcggttgaggaacagcatcttgccaaagtcgccgccctgccgccggcgaaccgccagcccggatcaatcgcgctccagaacccccagggtctaccgcatccgcccggtctgccgaggcatctcgaaaaggtcatcctcaacaacccgccaaaggacggtagctcggccggcggagggaccgagaaggtgaccgccagtggcgcttgctgtgcgtgctccttcccgtctcgctctcgtcattccttcctggccgactcgctgaccctgctcgtcgtaaatagggaccgccacgcccgacgacaactcgattctcccgatccctaaccacgtcgtcctcaaccacctgacggcgagcgcgatccgcaacggagtcctagccgtcggcacgacgacgcgctacaagcgcaaggtcggtcgagccttgtgccttctctctctcgaagcgagcagcgcccgactgaccgccttggacctctaccatttgaccgactgcagtacatcagcacgctgctgtataagccggtcgagctctaatctgccggccgaccgccccgcggtccaggccgtcacgcggccctacttacccaccccatttttagtccaaggcgaccatgccctggatcgctgcccgcccctccacacgtttggccgccctgccggcggcctgcttttcgccactccacgccataccatctccctccattgcatcatagcgctttcccgcctctcgctccatcggccccgccgtcggccgatccccccctcatgccgcctccacgcccctgccctgttgtctaccacctccatcctgtatcgatcgaaagctttccgagccggtgccctcgagcgacgaaggaggaagcgttggcatgggtggagagacacgcggcccgaggggtccgcagccctacaagagaagtcggtcggtcggaggggcgaagtagatcagatgggggacgagacggaagctgcggacgcgggaagacgacaagagatggagacaggtgcaggagggaggacggggtggaggagagacgagcgagcgctgctgctaaagggtagagacggtccggcgggcccgccttaagtggtggccgcctgcgatgcgcatcaaagcggtcagtcctcggcccggccttcagaacgggcattcgacggcacggacctcgttgaccggagcaccgtcggagacgccgccggcgagacgctcgacgatcgacttgatctgcgacagaccctcctgcaggtccttggcttcaaagtccctcgtctggccgagctcgagctcgagcgagttgcgctcgcggctggtctccacgagccgaagctggaccaacgacaggcggtcttcgagggcctcgaacgcgatcgatgcctgggcgacgtcggcgttcagggtaacgatccggtcctgcgccttatccgcctcgctctttgctgccatctgcgagttgagagagagcgtatgcgagctgctgctgcgtctcctcgaactgttgcttgagggcattgcacgagtcggccttgacctgccgtgccctgtcaggaagtgtaccttgcgtcagcggacagaatggctagtcggggaggcacgagactgacagctgcaaggcgttgcgctcctccgttagcgctgcgacagcggacccgagcgaccgagctgatctgtgaaaaggccgtatgggtcaggccaggcggtccggcgaaacggcagggctcagacttacagctgtagccgctcgtgctcgtccgcaaaagtcttgaccatttgctgcacctcacgcaggtgcttctcgccgacggccttctcggcgatcagccgagtgcactcgtccttctgagtagtgatgaccgtttcgagttggctgcaaggttgccgagtgcagtgtcagcacgagatgagtgacgggcagtcaacagacgcttaccacttagtcgcctcgagcgccgcacacagcgagccctgactgacgctcgcagtaagaagcgcgttgcattcagccttcttctcgacgaggtcggccacaacggcgctgcaagggcggcaatggacaagtcagcagcagagtcgagacgcttggctcgccaaggagacgcacagccggctgagccgggtaaggtcgaggtttgcctcctgttcgtcgtgctgattgcggagggtctgaacggtgctgcgcaggattatcgcaagggtgaccgacgtcagcatgcgctgggcgagagaaggacgggtcgacgaacgctttctcggcctccagtgccgaggcgaccgtggcgcgctcgtgctcgctccgagcgaccttggccataagagcggcgacgtccttcgaggccgctgagacgtcggcgtttttggccgcaagagtgacgcgaacgtcgtcgcgctcctttgtgaccgaaacgaggtcggtccgagttgcctcattggcttgctcgagacggccgatgtctgcgccgttcatctctgttacgactcggttctggtctccggcctcagtcagcttacctgtaatcgcgtcggtccactctttgagggtcgcgacgtcctcggtcaactggaggttccgctcaagaagctcgacgttgttgtccaagacgctggcgagctgcagccgcaggccggcggcctccttctcgagaggactcggcgtggtcgggtgcgcgtcatgaccatcgacgaggggtggtgagggcgatagggtatgctgctgcgaatggcgcgactcatgccgtgagagcggctcggtccgtgcaagcatgcgcgactggacgccgagagtcggcgacgacggcaggaagttggcctgagacgagctcggaccaccgccgtgaacctggttgtcgacgctcagcatcgccggtccagtgcctggttcgtcgatgaaaccgtccactgcgcggttgaccgcctcgccgctcggcttgggcgtatcggcggttggagggacggctgcgtcttcctcctgggcggcaacgccgaccgacttgcttgcgtcgacgaagagcccttcctgcggctcctctgtcgcgtcgtccggtgcagttgcattcgcgtcgggtgcagacgagagcgagctggacgacgagtagcccgaaagacggctgcatgcggcagccgagtcagctgagggtcctagcaattgagaccctgcagcataacgtaccgggcctgtttcatgtgcgcaaaatcagtctcgagacgcgcgatctcctgcttaaggaactatgagaggcatttcggtgtcaatcctggcgccgccctcagttgcagagggaggcatgggcgagtcacctcaattgttgacacctcatcctcctcggcaggcagcatcgcgtcgtcgatggccgcactgtcggagcgcgctttcttgaagttgccgtcctcttcctcgttgctcgaggcgcgcttaagcgagatgcgcgacagcaggctgggtggggcggtgccggaagttgacgaccgagtgcgcttgaccggcgccgggctgatagggggcgtgatcgtcccgagtggagcgacgtcctgggcgatctggagccagatgcgctgcagaggccaggcccttgccgatcagcctcctggatgcggccgatcagaaggccgacgaaaccagttaaacggacttacctcgtccgaatgggctacattcatcccatcgacgacgagcgactccttgatggctgcgatacgggactggccgcccccgctcaggctgtagtttgactgcttgcgctcgaggaggccgtcgtcgacctgcacacaagggtccagcaggcaaggtcaggaggcggctcctgcatcatcgaggacagcgcgcacgagttggtgcatggcctttaggacgcgctgcgggtggtcgagccggaagcccgactccttgactgcagaatagacgagagggtcaggtcggggccggggcgcgtcagtgagggcggaggctcgagcgcaggatagaagaagaccgacttttggtccggatgcgctggacattgacgccgtgcgcattctgctccgggtcgtggagggcgccaaaggcgagaagcgactctagagcgtcacaggtcagcgtttgtctgaggcggatcaggagcacgaggctcgagcggtgtgacgcacggcgcatgtaggtgcccgactcgacggtcgagagcgcgtcgtttggtccgtcatcgtgctcgccgacgctcatgtcgtcgtccgtaccgttatcgtcgtcctggacatcatccatgtcgacgtccccgtcggtcgccagggccgcctcatctcggtcgctgccgctcgcagctcctgttccggtctggcccaacggtccggcagcggccacgttcgaggacgatggctcggcgacgtgcttggccttctttttggccggccgaatgatcttggccatgaccgagagccggcgtagaaagctgaggagggtccgactcgagctgggagggtgcaggagaagcagcagctggtcagcgacaggggagctgagagcgcgagacggcttcctcgaaaagagggagtcgcgccgcccagctatctcgcaggactcacttaaaagagtggaggtgcctagcgagagaactacaggcagctctggaaaggtttgcgtcgatggccggtggtgaaggaggacggacgagctggccgtcgagcgaccgggcgacaggcagtcgactgcgcggcggcctcttgcgccttcaagcgtcgtcggcagcccgacccactccacttgccccggtcaaagcttctccgctctgactgaggtgaacggtcgtctcatatcaggccctcggccttgagcaggccaagcagcagtcgagcactcgttcggccgcggtcgaccgccctggcatcgtccttcgccccgccgctgccgcccgtcgccgagaccgcgcttgcctgtgttcggacgccgtcggccggagggaccaggcacctcagcaatgcccgcagagcctctttttggcgctcaagccgctggttggccgtctcgtcctctggcccttgatcctcgccggccaggtcggccgacagcgggaaccactcgacctcgatcagcaggccgcggttgagcccgcctgcgccactcgcgcccgtcactcggacgacatattcggtctcgcgtgcaagaccgtcgggcggtgccgcaagaccgggaatgaaggccgacgactttgggtaggcgatctcaaagacctgaccatcgagcttgagcatctgcgccgcaggtcgcgtgttgcgcgacgaattcgacggcgtcatatcggtcacctggagcggcggggaaaggatggtcaggtctgcgcgacataaaggcaactagccggtcgacgtacaagaccggcgctcgggttggccggctttgaggcagcagcggcctgaacgaatgggctcttggtgaggccgagcaaagagttgagcgacccgggcgggctcatggcgacgagcagaccagctccggccccgtcctccgatccatcttcgaccgccctcgtcttgcctttcgtctcagccgaggccaacgccgacgagaacaggacaaaggcgtacggcgacgagggcgagaggacggtatgcagcgtgcgtgagacgtcggtcgacgagcttccgccggcagtcgagctcgataccgacgctgccggctcggctgggaaggtgccccggtaggaggtgatgtactgatgatgcgagccaacccggacagcctgacggaagggggaggggccgctcggctaggtcagctttctgcatctcaggcggccggccaaaggcggctccgggttgaaccgacgagcagctgagctctcttccgcacctgatgctgcttgacgagggtctcggcaatctgctcgagtccgcccgtggtctgcaggtagccggctcaattccaagttagccctgactgccgcctggtcggaaagtaatcgccgaggctcggacgacgcaccggagggttcgaccaacggatccacgcctggaggaccatcgcaaggcgaaagctggcaggcaagggggtttgacagacaggcgatgtcgcgcgctggttcgcagagatctagctgacggagccgaggagcgattggcgagggggcaggtccaggtgcgaaaccttcggtggtcgttcgtcgacgacgagaagagaggtcgctgatcgtgctgggcggcccaggcagaagcccgccgcgcagcaggacgagttcgcagagtcggccgactgcctcaagctgatcgcgtacgaaagcgcaaagatgacgcaatgcgtttgagcatcgtgtgggtggtacggcgaggaggaaaggcatatgagaggtctacagtcggagagggtcctagaggagagggtaaagcggagagttggcgcgaagggcggagtacggcggggggcgagttcagtcgtgtgcgtgagtgagagtatagaaagcgagagagcgaggtttggaaagttgcttgagagagtgaaaagggtccagggtctaggtggctccggttggagtcggatcaaagccgagcggcaaggccctcggtgatcaagtcgggatggagacgagaagcagaagcgaagagcgaggccccccctctactcgacggtgacactcttggcgaggttgcgcgggaagctggagggaaggagaaggggcgagcgcgtcagcaagtccaagccgagcgccagtgcgtcgaacggaactcactcgacgtcgacgccgttcatgacggcgagccagtagctgaggatctgcagcggcaggacgttgatgaggccctggaggcagtcgaccgtcttgggcacgcggatgagccggtcgtcggcgtcaaagctgaagtcctcatcgttgcagatgatgatcggctggcccttgcgcgccttgacctgttgaagcgcgctctgaaccttggggtagaggctgtcctgcgtcataatgaggatgaccgggaggtgctcgtcaatgagcgcgagcggtccgtgcttgagctctccggcgaggatctgcgagagaggcggggagggcagcgtcaacatacgcgcggagcgagaggaaaaagagaggggacgcacgccctcgcagtggcagtaggcgacctccttgatcttgagggcgccctcgaggcaggtggcgaactggtagccgcggcccatgatgagcaggctcttctccttggcgagcgtgccccgggcgagctcctggagggccttgtcctgctgaaggacgcgcgagatctggccgggcagctcgtggaggccgtcaatgatcgaccgccggcgctcctgcttcgagagggcgtcctccgagaactggacggccatcatgacgagcgcaatgtactgcgacgtgtaagccttggtcgaggcgacaccgatctcggggccggcgttgatgtggacgccgcagtgcgactcgcgcgagatggtcgagccgacgacgttgacgacgccgagctggttgggcgcgagcgggggaagcaccgtcagtgatcgggcgcccaaggaggccggggagagcttaaacgcacgcagagggcaccgcgctcgaggcagtagcgcatggcgaggatggtatcggccgtctcacccgactgcgagacgaaaatgcagacgtcgtcgcggaagatcgggcagcgccggtcgaggaagtcggacgcgagctcgacgttgacggggacctcagtcagctcctcaaagatggagcgggtctgagagggggaagccaggaggggcaacggtcagacgggcgagccttgcgagaggattcgcagacaagactcacggcaacacacgagtggtacgacgtgccacaggcgacaaaacagatgcgccggcagcgccggatgacgttcaggtacgacttgaggccgccgagcgtgacggcgcgcgtgtcaaagttgacgcggccacgcatcgtgttgacgaccgactcgggctgctcgtagatctcctctgcgaagggggcgagaaggaacaagggttagccgacggtcgcagtcgaacgagcaataacaaggggaggcgcactctgcataaagtggtcgaactggcccttcactgcggagcgtgacaagtcgaggagcgggtcagcgccaataaaagctacagagacgcgatgagcgcgcggcagactgactgatctcggcgagctcaatctcgagcgtctcgatcgcccggaccgagctcatgccgtcgtcgcgccggagccggtgaatgtggagctcgccctccgaaatgtgcgcaatgtcgtcgtcctcgaggtagaggacctttttggtgtgctcgacaatggccgacgcatccgaggcgacaaagtactcgatcggctgcggcgcgccgtcgtccgagaggaaggcccgcgactgcgtgcgccgcacgttggccttgttgttgacggtcggcgggaccgagaggtgcgacggagccgagccgtcggtcgtcactgagagggcgcaggaacgccggtcagcgtttggacgctcgcccttaggtgaggtagcacagggcacgcactcagctcaatcttgtccgattcgggcgcgacctcgacgtcgacaaagtcgaccttgagtttcttgtcggtcttgacaccgatcagcaggggcgatccgcgccgggccatgacgagctcgccagggaagtaggccgacttgaagccgaaggcgaacgagccctcctgcgagagacgagcatcgacaagtcttgtcagcgaacgctccgacgaaggacgaggcgaaggcacgagacgcacgagctccttgatgacggccttgatgagcgtcgtgaatgtgaggcgcttggtcggctgcgagtcccagatgtacttgcagaggacagcaaccgtctcggtgtcggtctcggtcgagaagtggtagccgcgcttctcgaggaccattttgagctccttgtctgcgtggcggcgatgggtggggggttggatcagcgacagttggttgaagccggcgacgaagtgtagctttaggccgacgtacagttggtgatgatgccgtctgcgcgcgggcacgacggaacggccgaggggtcagctctaaaacgcaactgtcgacggggagagagaaagggggaccgactgtgaatgacggtgaactcccgcttgacgtccgactggtgcgggtggcagttgagcgggcccggcgcgccgtgcgtcgcccagcgggtgtgggcaaacgacgtctgcgagaggtacgtctttttgaagtcgaccttggagtcggagatcaggctgcgaagggccgcgaccttgccgagctccttgaagagcctgcaggtcgcaaaggagcgcagagcaggagcatgagagtcggatgggaggagggcgtgaaagtgacggggagaaaggcggggtggtggcgcagcagaccaagggcagggggatcagcggccggccatcgtcgcgctaggaagaggaaaggacaagcacgcacatggtctctccgggcttgtcgccctcgattccgatgcctgcgaaagagcaaaagagggagcagagtggtcagcgagtcgccgatgagcgatgccgagaagtcgcgcttcgctcccggcgcgcgaaaacaagtcgaggcctggggcccgacgacgcagaggcaaaggacgcaccggccgagtcgtacccgcggtattcgagccgcgagaggccctgcgtgaggacatcgcagacctgcttgcggtcctgcgggcggtcaaagcagaaaggagtagatgagaggaggtcagctccggaggccgcgggaatcaaagcccggcggccagcggcgaggtcaaagcacagcgacgcaccttctcgaccaggaacgagcagtacgcaaagatgccgctgaaaaagagagccgttcgccggcgtcagctccgccacgaggaggcgggccaggtcggatacgtaccacatgacgacggaggggaggcggtgagctgggaagaggagggttcggaggggatgaacgagagggagccggctgaagcgggcgatggggtgacagacggcaaaggcggtcagtcaggctcctctgcgagacagacaagctggctggcatgcggatagctgctcctccagctcctttgatttctctagatgaggtcagcaaaggaggaggagaagcagtcggctaggccaaggcgcaggacgaagccctggtggctcgcgcgcgtcgggtgggacggcgccatcaacgggcggtcctgtccccgacctcgagccggcggctagaagagactcacgggcaggcagggagaggaggagggggagtaagaaacgcgacgaggtcgggccgaagatggagaggagggcgttcggtggaagggagcgaggtgggtgacgagcagagacgttgatgaagccacccgcccgccgcgctctctggcgcctgatttgccgtgcgcctttccaagccgtgtttggcggcagcgcagcagcgtgacacgacgctcgagtcgagcgagcgagcgtccagtctgaggtcgactccttgcagccagcgttcaagtcatgaggatacgatggtacagccggcgccggcagaggcccgtgaagagaccgggtacagttacaagatggggagaaggtagccgcctctgcccctctccttggtcactctctaaatgctacagctcgtcgacaacgctctcagcagcaaccgccgaccgcgctgacgccgtcgacgcccttgccggcaccgacgcccttgccggcaccgacgccctcgccgacctcgtacttgtagtctgggccgatcatgaccttgatgacgcccttgccggtctcgtcccggccgcgggcgacatcgacaaaggcctgctcggcccgatcgagcggataccgctgcgagaccatctttgagataccggccccgagccggcccgaggcgaggagagcgagcgcggtcgggtacgtgttgttgtaccggaagacgcccattaggtccacctcgcgcgtaaaggcgttggccgtcggcagcatggcttcgggcgtgcccatgccgacgtagatcaccttgccgccgaccttggcgagcaggatgccgacctgcatgcacgactgcgggcgaagggagataggaagcgagttagccagtgtcggaaggaagaagtaaacggatcaacaaaacgcacctcgacgccggtgcactcaaagacgctgtcaaagcccccgttgcccagcttctcctcgaagaacggaacgagcgctttggccgcctcgaggctctccttgccgctgacgcgcggcccccggggcaggacgagcgtctcgtcggcccagccctcggcctttgcaaactcgagcttgccctcgtcaatgtcgacggcgacgacgcgcgtcgcgccgagcgccttggccatcgcgcatgcgagcaggccgacggcacccgcaccgaggacgaggacggacgtgcccggctcggggcagcgcgagcggcgcgtcgcgtggatgatgacagacagcggctcggccagagaggcctgctcgtacgtcacgttgtcggcgagcctggaggtcgagaggcggatacagggggtcagcatgctatgaggtacctcgactcgctcggactctctgcgcgacgcgactgacttgtagaggtagtcgaccgggtgaagcataaactcttgaagtgtgccgtcccggtgggggaacgtcttggctgatgagcagaactccatggcgacgcagaggttgtacgagccggccttgcagtacttgcaccttttgcagttgacgccggcctcctacagagcgaacagaggaaagaaggctgtcagcgtcgcgagctgttgtaagtgacgaaggaggcggacgtacgactgcaacccggtcgccaaccttgagctcgccgctgtagttcggcgggagctcgatgacctcaccgccagcctcgtgaccaagaacgagcgggctctggaggatgaaggcgccgttccggccgtgcgtgtaatagtgaactgatagacgaaggcggcgaggaggtgaaggtggtcagcgtcctgctggtcagaaggcacgggccatccgggccggagtgagcgtgctgcgcaacaaaggtcgactcacggtctgagccgcacaggccggtcgcgatcagccggacgacagcgttgccgtctgcagcttgcgggacctcacgcgtctcctgcaggacgacaaagatgcttgggtcagcttgcctggcctgcctcaaggcacgaaggaagaggacggacgatgcgcatgtccttggcgccgtgcaggacattggcggtgtaggtctttgctgacatggctggagttgagacgaggcggaaggctggcaggcaagcgtgaagggaggatagacgtaagggtccaaagagatggagagtgagggtgggaggaggcgaggtcgtcggagaggagggaggcccttaagagggtcgctcgccgccgggccggctgaagcaggctccccggaggtccggaccggaggtgcgagcagccttagggttgcttgataagccgacctcgaggctcttccggcgcgcgacggcgccagctcgactcacgacgcacgacaacgacgacgacgcgacgagacgacagccgtccaagcccgttcattgccgcaccctcttctcactcccaggatgaccgaacagacaccatcgtccgtcaacccgctccgacgcagccccgctgtgcctttggctgacgcctgtctccctcccccttgacgcagcagtacctcctccgctgctgcggctgtcgccggtccttcctcgcacgcctcgacctcgcagctctctgaggacgagcactcggcctcggacggcgagctctgggaaggcctgatggaggacgaggagacgtttgattggggcggcttccgcgagaagcgcatggagcttctcaaggaggagtgcgtcctgtcggccgtcgcgcgtctagctccttgaaactgaccccttgccctccccaattatcaggcaagagcgggatcggatagctaggacgacgacgcgcggcaaataccgcgagatgacggtcgaaaaggagctcatcgagacatcgtcgtgcgtcgtcgtcgaccttctctcgcgaggctctgcgcagcacctgcccgcgctcgctgacttccgcttcgcgtcccgcctcgacaggaaggaggactactgcgtcattcacttctcgcacacagacttccgaaggtgtcggatcatggacggccacttggcggtcaatcggcggtgcgctgcggctgcgcactggccactggtcactgacatcgctgcccgcctcttgccagaccctcgcggcaaagcacccccagacgctgtttctcaagacggacgtctcaaacgcgccttggctcgtcaacaagatgagcgtcaagatcttgccctgcctgatcgcctttgtgggcggcgcggcaaaggacaagtgcggcccgcccttcgccagagcgtctcgtatcgccagaatccgtcgtattgacagacgcacctctcgatattcaggatcctcggcttcgaggactttgcgccggtcgcgagcaagcccgacgaattcccgacgtcgacccttgagctccggctcaagtcatccggtgcgtcgcctcccggagcccgatcgtgaactcatcctgactcgtctctctcgtctcgatccttctctcacgcaggcgtcctgcctgcgcccggtgcaccccggccgaacgcgctcgcgactggcttcgacatgagccggacggccttcggcgcaaagggcccgagcgggatccgcagcggcagtgcgcgcaaggcgggagacagcagcgacgacgactattagaagcgtgtttctctgagcaacgaaatcatcgtgctgtgactcgaaggaagagggttgactcatggctggtcgacggaagccgacggcatgtgagccgcagcgacggcagccgcggccaacggcgtagcggcatcgagcgcggccaacgccgcccgcctgtcgtcgacccgtcttgagcagccctctcgtcgtctctgtcctcccgaccgtcactccgtccttttcagctgcttcctctgctacatccgctcgaccatgtctcacgtcaagggctttaccgtgggtcgctattcctctgctcgctgcgaggcttggccgccgccgggctgatccgaccatcgctcgtgcccagactgcgtccgtcgagccgacgagctcgtacttgtctgccgccgtcgaggctcctcatgccggcctcatctttgtctcgggcatgtgcggccagaacgagggccaattcatccagggcacggtcaaggaccgcacagtccaggcgctgaggcgggtcgaggcgcttctcaaggagaaaggactcgacctcactgacggtacgtcgaccagtggccgagcttgagggcttgagcgagagcccaggagaagatcttaagctgacgtgctctggtgcttctgctgcgcctcctgccagtcgtcgcctgtaccatctatctcgctaattacgtcgaggacttcgccgccttcaacgacgcctacctttcggtcttcaccggcggtgtcaagccgtcgcggacctgcgtcggtgttagcaacctgcctgcgggaaccgacgtcgaagtcacggcgaccgcgcttcagcggactggcgggcccaagcgggccatctcgagcaagcacgcgcccccgccggcgccgttcctctcgagtgctatcgcgactgacgagctcgtcttcctctcgggcgcctgcggcgtcaagaatggcaagtctgtcgaaggcaccgtcgctgatcgcgctaaggtcgccctctgcaacgtcgaggcgcttctcaaggaggagggtctcaacctcagcgacagttcgttcccttcgctgccgtcctccgcatcagaagagccgaggttgacatgcccctgtgcgatccccagtcgtcagcacgaccgtctacttgaccgactacgacaacgtccggccgacgatggaccccgtctggcactcgatcatgacgtcagcgggcgcgtcgctcggcgtccggacgtgcatcggcgtcgccgagctgccggccaagaccgactgcgagttcacctgcatcgccgctcggcggggcaaggtcgctattcctgcgacgcctgctggcgctctttactcggaggccgtccggctcgacaaggccggcctcgccttcatcgcgggcacgacctgcaccaacctcccgaaggatgccggcgtcaaggcccacaccgaggccatctttgacctgatcagccagcggctcgccaggctaaagctcgacttcagcgacctcgtcgccgttagtgggtgtcggcctctctctggcgttgcgccttacatcctgtctgaccactcgcttgccgacagcgatctaccttgccaactacaaggaggattttgccgccgtgaacgaggtctacacgaaggtccttaaggcgccctttccttcgcggaccgccatcggcgtgcgtcccacttcgcctttcctcgtcgtgaccgtcgctgacgccgcctgtgctcgatcattcaggtcaagtctctgccagaaacaacggacgtcgagatcactgtcacggctgctcttagggtctgagtccgccgcctttccttcacaacgactgggtcgctcttgcagctgctgacgatcgccctctgctgcctgccaggtcaacacgtcgaagctctgacggctgccggatgaccaccttgttttctcgcttgcctcgttgtaatcattgtccctttgtactgtcagccgacagcgtccccttgatgctccgaaagacgcgtcagccactgcggccgatgaaggggagaggtcgatgccttgttctcggcggtggcgctcccctccccttttcatcggtttcaccgggccccttttcccgacactctcaaacgcccggaagctcgggctcctcaaaagggccagctgaaaagcgaatcggctcctcttcttccctcatcctcatccaccctgccctcaccagaatgaagccttccaccgccagccgcacccactctcgccgcgtgcagatgctgcccgtcgctctcgtcctcggtccgttcctcttctcagcctgctctgccacccgtcaagcactgcccactgatccctttcatcctccacctttcttttagcgaccctcctttgcttgtcctcgatgcacgtcaccattcactcccctttcgggacccctcgcttctggccggcagcggcggccgacccacccaaggcgtttgcgcagctcctgcacgacatccgccagcccgcgcccgatagccagttcaagcgcaacctaccgatcgagctcgtcgacggaagagtgacgtcgacagcctgtcaagctctcggctggaagcctcgggctgagggcgactctgtcgaggtctgggacgcgtttgtctttgtacgtcgccccgcgtccaacctctcgcttttgatttgaggctgacctcgctccctttgaccgcagaacggggagcttgacctgctcgagctgcgtttggccgagacctttgactcaatcaactcattctttgtcagttctctgggctcgaaattgccgcagctgcacaaaagctgaccgctccattctcaaccctctgccagatcctcgatgcgtgcgtccgaccatcgcctgcttattgaccagccgcaactgactcgacctttacgtacctttacgtaccaacagatcgcctcaaagtctcctatccgagcggccgtcgtccgttaccctccctccgaacctcagccgcttcgccccaaagctccacgtcatccacctcgacctcacgtcgatccagatgccagacgcacagaccgccgccctgcacgcccggatgacgtcctactgggccgtccgccagggtcagcgtgagcgccagctcaaaggcctcgagccggacgagggcatctcggtcgaggtgccgcgtcatcgagggtgcgatggaagcgatcgttcggcgcgagacggccgaggtcgttcgcgcttgccaggcaggcgacggtgagggcctgcgactcggcatggagccctttgtgagtgcacgacacccacggcggtctgcgacgttggggctggtctgactcatcagatctccttcgacagctctactcattcgcccatcctctggttcgcatcctccttgctctgcattcggcgaggacccgacactgaggcctttctttttttcagctggccgcctcggtctcatcctccctcgtccgtccgctcgacctctcggactcgccccgggcggtcgagggcggggcacttctggtctttgatgaggccggctgggagtgtatcgcgtgcttcgcgacgctcgcggcgtacgatcactggctgcttggtcagtcctgcgagtcgctcttgctcggagaagtagcatagtgtgctgacgccctcggccccttctggtattcagacgagcggtcggcgtcggacgtacggccggtcgcatcgccctcccgcgagagcgtccaggacgcgctatgcgccggcgacgacgtcctcgcactcggagacgcccgctcgacgcccggggtgagtccttctcgtgcaaaagattgtcagcaagtgccttgctgatcacgactcttgccctccgacccagtggccaaccctgtcagcctcgttgagcccctactcgtgcgtttgacgtcgagcgccatcatccgctcatgcgtctgcacaagtattgacctgtgccgccgttcccccgacgtctaggtcacgctccgccacccacctcccgcaccacctcactgccgtctcggaccggctcggttggctcctgcctggcggctgcgagcgccgtgcagcctgaaaggagacggccttctggcctcgatcgcatgtccttgactttacatcgatgacatcagcgtgcagtctgccatccgagctggtcagtcagagcagaatgggtccccggcggtgatgccgggtgctaggttgcggtcgctgcgctttcgcgcgtgcagcccctctgatcccctgtgggaaacagcagaattttgacaagcaccggcaggacggcgagcaagcacgacagcaacgacagcgtctactgcgaggacgacagcttcgacactgcctgagagttctcgccctgagagatgcttgttgcgggtcggtttaggactgctgaaatcaaacctagtgctttcccaagtgaatagcccaatgtttgggcaccgggtcgggccagcgcagccagggccgcagcctgctcctcggcacgacccgcgccccgcctttgccgtcctcctctcgtcgtcagtcagcaagtacgtgccgttccgagacctgtgcttgacgactctttgacgacaagcatcctgaccatcgtctgctcccttttaccttcaggatgaagtcagtcttgtcccgatcggatcgttgccgccctcggagggagctgtcggagctgacctcgtgctgcttgctcctgctcccttgctcgtgctcgccctcaggctcaacatcgccaaccccgtgcgtccggctcgaccaggcttgcagcgtggctcgctcgctgaccctgtcgatccgctaccctcctgcaggccacgggccagcagaagctgcttgatatcggtgaggcccagttgccttcccccagctcagctcagcccacccaatttgagctctgccgcgcgcgccggcgcccgatcctgcccttctggaccctcagcccctctcgctcggagcgagcacggctgctggactaccagcaccgtgcgaggggcaaacacggatgagcagctgcttcggggagcgacgtcggagcgccgaagcagggagctcgtgctgctcgagggctgggtcgggagcacgccacagagcaggggaggggctgcggcgatctagagagggccaacgactgaccacgccattccgcccgccactcgacagatgaggagcgccgcttccgcgtcttctacgacaagcgcatgtcgcaggaggtcccggccgactcgtgcgtcccctcttggccgactcgagctctgctcgcacgcgcgccggcctgctgggctgacagccagcaaatctcttcctgctcccatccagcatcggtgacgagtggaagggctacgtcctccgcatcaccggcggcaacgacaagcagggcttccccatgaagcagggtgtcctcctcccccaccgtgtgcgcctgctgctctcggacggccactcgtgctaccgctcccgccgtgccggtgagcgcaagcgcaagtcggtccgcggttgcatcgtcggaaacgacatcgccgtcctctcgctcgtcatcgtcaagcagggcgagcaggacatcgagggcctgaccaccgaggctctccccaagcggctcggccccaaggtccgttccctgcgattcgcccgcttcgagcatgtgttcgcagtctcctgacgcgtgccctcatccttgccccactccagcgcgccaccaagatccgccgcttcttcaacctcaccaaggaggatgacgttcgcaagttcgtcgttcgccgcgagattgtccccaagaaggagggcgccaagccctacaccaaggctccctcgatccagcgcctcgttacccccctccgcctccagcgccgccgtcacctccagtcgctcaagaagcgcaagaccgcccaggtccaggagcaggctgccgagttcaaggttctccttgccaagcgcgccggcgagcaggctgccgagcgcaaggcccaccgccaggccaagaaggccgccgccgccaacaagcgggcctaaaccggattgtcgtgctcccttgacgattctccaatgctcttctgacttacacgccctgccgaggggccggagagaggttggggagcgggttcggcgcgtggtctcgcccgtccgtggctcagcacacggtcggggaatacggtgcaagggccgtgcgtcaacgactacgccgagcgctgcaggtgtcccggtcgtttttagccttcccggctttggcggcctataagttggccgccgagcaacatgaaggcacgagaacggcgccgtcagaaagaggattcttctgaccttccaattttcagtgagctcttcaggagaaggtagagcgaatgagaaagagggccgaaagagatagtcggaggaaggttgagctgcgacgcgtcccattgccgaccagaagccccgaggcacccaatctgtcaactcatctgaaagctctcttgaatatacttaaatgaggtccaccatctcagttttctaacggcgccggtctcgttctcccgagttgttcggtggccagctaattgagcgctgaaggcgagagatcccaaaaacgaccggagactgcgcgagccatggcaccggagccacacaaggccgctctctcggaagccacatgccccctatctgagtgggacgtatgccacacctaccctcgactgcacaagagcaggcgactaccggcatgttgacgtcttgcccttcgcaagtcacgctgccgcgcgcacgggctggcggtcgcagtttgccttaggcttgtactttctccactcactcaagcgaaagcaacgctcatggattagctggaatgaaagagaacttccgcaggccccagattcgacctagagcgagtagcagtcataaactacttgattgccacagcgagcggcgctcgctatcgcaaccgtgtcgttgagccacaagtactattggacaggtcgcagaaagagtcagcgtccgcgagagcgcaagctaatggcaagacagactgacgcgctcgtcgccagtctccattgtgacgtccaggcgcatcttgtactggtcggccgtaatgctcgtgtcgtcgccgagggcgtcgaggatctcctttggaccctgccggatgcccgtcgtctgaatgtagatgctagcgccgtcgtgcgtctccaatacgtagcgtgtgtcgagccgagctcttgacgtcattgagtcgacaatctcccagtcgccacctccggcctgtttaagccaaacgggcgtcagcgcgtgcctcgattgaggaaaggattgagggaaggaactggacgaacgacaatcgtccctcgcatcctcggaccctcgaattggccgcccttgaactgcggcaggagcgagtaaattgtctcagtgaagaacgacggctcgaacgtagcgggcagctcaccatgacgttcatgcggtgaccgaacggaccggcgccgatcgagcgactgttcgggcagcgagcgtcagcccttgccaaggcgcgtcctgcttcgcctcctactcacaatgactgcatgtcgcattccagatggaacagaaattcgagctgaggcttgggaaggatggagagatgctccgggtgcgtgaaggtcgtgtgcttgggcggcgtcggctcgctcggggacgacatcttgcgagcgcgcagtgagggagctagcgggtgcttggagggagtgctgcgaagtgggcaaaggagagaggtcgctgttgaggtccaaaaaggaaacgggcgtcgacagagggggctgactggcccagtgacgcagctattgtcggaggcgagcggcagcagctcgatcgcgcgcagcagccggccggcgacctccgatccgatccgccttctgcgcaatcaattcaccgtcgacactgacgagcggccctgcatcagatgagagcatcgcctttcgtggagaaagagatctgcagtcatgtctagtcggcacaccggcaatcgcagccgacgtcggcgcagacctggccatcctcgtcctcgtcgtcctcgtcgtccttcgcgaaccactcgcgaaggcagggcgagcggtgccctccgtgtcgacagcgaaggcagtagaccggtcgcaggtcggctgcgaaaggccaaattagcaagatcagcacgcgatgcagccaacgagattgcccaaaattaaaccgaccttcggcgtcaaagaccgtggtctcgcccaggtagtcggcaggtgcgcgggcgatgctgagacggcctgcgagtcgcggtcgagaggtgtagagtcagtaaggatgcgcacacttgcggcgacgtctgatgtgctcacagatgacgcaattcggcaggccgttgtggcagcctgggcagagtgttaccttgagcgagggggggccagggctgatgtcagcagtcggcgagtaggaagcagcggagggcaaaggagaacgcaccgacgagccgcgcacaccgctgagcgacgcggtcgctcgcaggtcggcaacgttcttgttgcagctgtccagaggcacagaagagcgtcagcagccgcccttgattttaacaagaaccgaccagacactcacaacgcgcagcgaacgatgatctccttcggcggtcggaacgagacgttctgctccctcgcgagtcggccgcgtgcctgctcgatccgcgctcgggcgacgcaaaggtcccagctctgcagcagcgtctcgtacgtctcaatccagcgctcgtaccgcgccttcaccttcttggtcggccagaactgcgcagcgatgagcgcgaccgtctggatgtcgcccgtcttgtcgatgtacgcctggagcagcgagacggcctctttactgtcggtcaggccggtcagagccaagcccatcaggtcgcccgacgccacggcattgttgcgactcgagcgcagatattgccggagctgagcaaaggaggacctctacgcgtcagcacagccagggtggtagcagaaggatgcagtacgtacgatgccgtcaggcgcccacttgagagccaggccaagggtgtcgaggaccgacccgccagcctcgttcaggacctcctcccagtcgccggtgagaccaaaacggcagacggcgcggacctcgatgctgtcgagcttggagatgagccgcgagctagcgatcgcgtacgagtcgcgcggcgactggccagaccttgatcggatcagcaagaccatcgtcaggtacttctcgtctgtcggagtcgaggaagagtgcgtgtcagtcgaggtgacagccgtcatctaacgccgccgtagagttgtacgcaccgccgctcgcctcgagggcttcgagagcgcgatcgaccgatcccgtaaacagactgcagaacgctgccctctcgtagtcgccagcacgctccatgctgggaaggacgacaaattagggtcagcgtggcattcggatcatgacgaggggcgaatccggtctggatcacctctggatccgcgcttcgagctcggcgctcgagagggcccaatcgagcactgcgagagcgcaagcccgctcctctgcgagcttggtcccgccggcgaccgagatggagatggttgtcccctcggaggccttgttgtcgacccagcgcttgcaggccgacttgtagtctgccggatctcctccagtcgcgcctaaacctgccggcccagcccgatccgacccgggcgacttgccgcggaggtcggcctgcccgcgggagtgctgcttgcgccgatcggcgatgctcagttgctggcccgaccggtcgcggctcgacgagggcgacctggtgcccgtgtgaggcgagcgactccgagcttgaagcagactcgggttaaacgacgccgactcgaggccgtcgaggatctgctggacgccgcggagatgaaactggtagcgcgaatagtggtccgaagggaaggcggtcttccaacctgagcagcgggggcgttgacaatctcgtcagcgcgcaatgtgagggctcccactgcaccaccgagccactcactttgtagccacgtccagaagaagctgagcgactcgtcgccgagctgattggcgacgccggcgttggtcgcaggctggacggtcgttgttaaggcgtcagcgtcatgcaagcttaaagcagtcgacgtcgacgggagatgctgacctcgactccgtagcccttttgcgcacgagactgaaagatgaccgacggatccgcggcaagcacgttggcggccttgagaagccgcttcggcaccgtacttgacggagcattctggctgaccgacggcaagtcgttgatgagatgaggggtctgctgcagtgtgggcgttgcgaagagagatgccggtgcaggggggaggggcaccgtcggtccgaacggggtcgcgtcctcgtcctcggacgagttttctagagacgagaaagacgggtgcttcgtgtgtcgccggcctttcaggacgaagagcttcttgtccggcgcggcgacgggtggaatgacgctgacacgtggcccgagtgtcagagagttgtccgaggcgaaggcaagctgagaaacgtaagacggagcgaagtggtcagcgatgcggccagcacgctggagcagggcggccagatggggacgcacgcgttgccgctggtgagacttgggccacaagatctcgccgcccaccttcgcggaaaaggcgacgacacgcgggacggccgatggcgtctcctcgccgccgcctgtgacggtccgaggggggaagacaaatgaagagtagacggctggcggtgcaggcggcgtgactacaaaggcaaggcgaaacgtcagctacaagtcaaaggcagaccgaggcggtacgtacctcgccagggctcgcccacgagcgagagcgaccggtcctcgtctggcgcatcgccgccgcccatatcgtttgctcctggcctgcagaggtcccagacgctgatgtcgcccgctcgctcgaggacggcaagacgaccgtcatgctcggcatcccactcgcagctcattgctgccgagcgcaggccgccgtcattggcagcggcgaggctaaagacctcctgcgccggcgcgcgctgatcccagatccggacgacgccgccgagcaggtagccggccgaggcgggcgagacgcgcggctcgcgaagcgagggcgaatagtaggcctgggcgaggccgccggccgtcccgctgttggtcgtcggcagggcgagaggcgtctcatcaatggacgcgagccgaaatggcgagaacgggtcggccgtgagcttaagcgagatgaccttgaggcctgcgccagcctgcgcgttgctcacttgcgaacctgagccaccggcgtggccggtcataaggcctgagccatgcgagccaaactggatgacaggctggactgtgccgcctgacggcggtgagcggatatcgtacagtcggatcggctggcgttgcgttgcgacagcaagcagcgacggcgacagccatgtcaggtcgttgaccgtctcggccggaatcagctggctgaagggcttcggccggtcgggcgataggccatctgacggctcctgctcgcttacgccgaggccggccgaggtcgggcccggcccggcgccttggagcgcgtccatgcgcgtgatgtcccagatgaggacgctcgcgtcggaccgcgtctttgtgaagccctgggcgagcaggttccggtagccatagtcggggcgcgagaaggcgatggcggtcgtctgccgggcctggcgcggcgggtgcagcgtcgtcgactcggtcgccgtcatctcgcccggccgagcgaacagcggccggcggaacgagataaggtcgatggcgccgcctgcgacggcggctgctatgagcggatcgcgcgagtggcccgaccatgcgagaccctgcgagggcgccaggtgcgatggcggtcagccagcatgtcctgcctcgggctgcgctgcggtcgcgctcctgatcggaagcctcaccgccagcgggccgacgttgtccctcgagcccatagcgacgacatctttcgtctatgacattgcacgaatgcacgggaggagcgatcagggtcagcctgctggcagcagtgctctgtcggggagcaggggagtgagagcgcacgctttcatcccaggcgtagagccggacggcgccgccgaggcctagcacaaagagacccgaccgccggggatcccagacgaacgaggccttcttacgcttgatgtcgtccatcctgaacgagcgagatcagaagaagtaagacgggtcgagtgcgatggaggttggccggtctctcgtgctgggcgcgcgctgctggccccgggcggaggcacgagggctgctacgcccggcccctcggaccatcactctttcctcctacgcctcggacgctcctacggcactaccccgtgacggctcctacgatggaccatccagacgaccagcacgcgctcctcgacccaaacctcccgaccgacgacggcggtcttgccgtcctcaccgccggtttcgaccaggaccccaacggcgcccaggctgccgtcgccggcgacgggagcccccagcagcgcgaccagcagcagcagcagcattcaggctcgtcggccgtcggcggtcagccgcagcaaccggccgacggctacccgcacccggatgccgcctacggcttttccgcccagggccacaacgaggagggcgacctgctctcggtccacgaacggccgcccggctcggacgacggccacagcgcggccggcggcggcgacaacggcagcgtgagcggcggcgggggcagcaacaagcgtcggcggtctggcccgcccggcggggtcgagctcgatttgagcacgcccgagggccaggccaagaagaaacagcgggcggcccgggcagcttacatgcgcgactaccgcaagaagaagagcctcggcaaggccggcggaaagtacggccccctccgcgagcgagcgaggcggtgcgacggcgcgtcgcgcccccggttgcttgctttgtatcgttgacatctcgtcacccgtctcgcccacacaggagcgaggacggcatgggcgtcggcacgagtgccagccactacgacgagatcatgaacggctacgaggccgacaagtgaggctcgtcgttcctaccgtcggatcgcgcagcagcaggctgacgcgacgcgacgcgaccccccggaccaggctgaagcagctcgacatggttgacccgtccatcactggccagaacggcagcggctttggcggctacggcatggctgtcaacctccacaacgccggcgacggcgcctttcacgacgacctcgccctccaggcgccgtttgtcccacgctcgacgacatttgctcacccggcccagctcgccgtcctgcccgtcccgaggctcaagtttctttttcacctcgagctcgagctcgacgtcgcacgcgaggtcggcgaggggccgtacggccggcgatcgtttgcggccgtgagtctttggactttcaaagcttggctacgtcctcagcctgactcgctgtttctttttgcttcgcagtacaagggcggccagtgggaaggaccaggctcccgagggaccgtcgcgtacgttccttttcagagctcgtccacttcatctgggtgacggcctttgacgccctgctttacgcctcctcttcccacaggcccggcgggggcgagacgatgacaatcgacttgacgacgtcagaggcccagatggactgccgcttcgtcctgacgaccaacgacggcgcgaacatcttcgtgacgtcgtctgggacgcaaactggcgcaaaggacgtgctcgacagcctcgcgggcgataaccagcagctccacccaaacgcctacacgtgccggcacacgatccggatcgagacgggcgacggccgggtcggtccattgatcgatctcgctgtcactacgcgcgtcctgctgacgccctaggctacccgtcccgaatcaatgcagtacaagtggcttaacaagaccatctgcgtcgctagcgccggccgggcgggcagcttggccgtctacgacgtctaccagctctgctgagctagattagcgactggcattcctttctcagcctctccaggggtcaccctcttccttcgcgttcgccctttgctctttgatctgtatcagcaaatctgctccatttcgtcgcaagaaacgcactgtccaatccctcgttctcgtcaacctcctcgctcacgcagtcagttcaccgaaacatcgcatcggatggcggtaaaggagaggaagagggagggggggggagaagcgggtgcagcaggtctaaactatgagctacatcgtcaagcgagggctgacatcggggttgggaagggtcgacgggatgcgtttttgaattgatcgcgagagggtaacgagctttagtcgagctcgtcggcgacgtccatgtcgtcggcggcctccgggacaggggcctcctccttggggggcggagcctccgtcttgggcgcctgggcctcccggggcttaggcttgttgaggatggccgagcagaagaacgagacctcgtcgcgccgcttgagaatctcctcggacgtcatggccgggttgacgttcttggaacgctcggcctgtcgggccatctataagaaaggagaggaaaggtatgtgttagtagaggtaggcggatgtcggaaagggaagacgcagcgacgcacctggttgtcgagccacgacgagtgggtggcagccttttcgacgacagactcgaggtccttagcgtcaatgtgcgagtacttctcgtcgcccgactgggcctttgacatgaagtcgttcgtgacctcgcgcagggcggcggcagccttgggccgcgactcggactccttgtgccgggcggcgatcgggccgccaatctcgagcagcttgtcgagcttggcgacgtaggccgacttctgggcgtcctcaccctcctcggtgtagagccagtcctcggcctcggcgaggccggcgaggagcttctccttctcctcagcttggacgtaagacgcgtagcggtcgtcgagcttgccccgcatgtcgtagacgtactcttcgagcgcgttcttgcgctcctcagtctccatgacgagcttgtcggacgagtgcatctcgccctccttctcgcggtactcgttgacgaccgtctggtcgagaccgctgtagccggcgacgacggggatgtcggtcttcttgatgaccttcttcatcttgggcgcggcaggggcagccggctcgccgccctcggcagtgtccatcggctcggcggcaggggccgacgtgtcctccttctcgatctcctcggcgaggtaggcgccctcgaacgagaggatgccgtgcaggttcagccgcgccttgaccttgacggtcgcgggctcgccggcggcggtcggggcaacgttcttgaacgtcgccttgccgagccaagggttggtcttgccggggagggtctcgggctcggcgtaggcggcctcgaggtcaaacggaccggtccgcgagaaggtgaggaccttggtcgacggaaccgagttctgcttggggaagacgaggagctcggtctcgtcgtcgccgggcgcgagctgctcgtccttggcccaggtgaccttgacggggtaggtgttgatgtcgtgaatggcaaactcgcggaccttgaagatcggcgagagcgaggcgcaagcaaaggtggcaccgcgggcgatagcctcgtcctggttgagagtggcgccgaggaccttgccggggaagagctcggagatgcgctccttgatcgaggggacacgcgacgagccaccgacgagctcgatgccgtagatgtcctcggcggtgaggccggcctcggcgagggcctgctggatcggcgcctggacgcgcgagaggacatcggcgaccagaccctcaaactcgatccgggtgagcttcgacgaggcgtcaatgtcgttcatgatcgactcgacgttgagcggggcctcggcgttggccgagaggaccttcttgagcttctcgcagccggcggcgaggcggaaggtcgccttggggttcgagaggacgtcaatcttgtagcgcgtcttgaactcggcggcaaagtgctggacgagcgcgtagtcgaggtcacggccgccgaagtggcggtcgtaggccgacgacttgacggcgagctggcccttggagaaggcaacgacggcgaccgagaggttcgagtggccgacgtcgacaaagacgacgttgcgcggcggctcgggggcctcgggcaggtcgctcttcgtgataccgtagccgagggcgacggccgtcaggtcattgatgagccggagcgtgttgaggccggcaatctcggcagcgttcagcatcgaccgccgctggatgtcggtaaaccagccggggatggcaatgacgacgtccgagacggcctggccgagctcgacgaccgtctggtcgcggagacgagcaaggaacatggcaacgagctgggtggccgagaagacggcgggctcgccgaggtagttgaccttgacaccgacaaagccgttgacgtcgacgagctcggcattgatgtgcttcttctcgatctcctggatctctgtgagcgcgtacgaagcggcgacagcaagctgacgggtcagcgcctgcaggacgagagcggagcggagggaggcgacgtaccggggtcgtcgaaccggcggccgatcaggcgcttgagcgagccgatcgtgttcttaaagttcgacgtctcggccgtcttggcggcctcaccgaggtaccgctggcgggcggtgaacgagatgagcgagctggaggggaagcacaggacgcgtcagtcgaaatgtcagggacaggcgaggcaagcgcggatccggttttgaaaactcacggagtggcgcggttcgagacctcgttgacctggcgcagcgaagagaacagcaggagagctttagcaaaggggcgcgcgcggcgagtacagagggggcggtacgcacgatgatatcaataccactgagaagcgtcagcagaggagcgcacggtggtcagtcgggcagctcgcaagggaaggagcacggacagcagcgcgccgcagctgctgcgtcgtcggtatgctcaccggttgcgcgcaacaccgatctgtcgagtagcaaagcaggctggtcagcagcagagcaggtcgacgcgcgagagtgagcgacgaggggcgcaccttggagttggcgttgccgaggtcgaatcctacaacggaagcctgcgagaaacgagcacgacgagcgagcgcagggagccggtcagcggtcgcagcagcaggggtcggaccggcggcttctcgccgggacgcaccattttgatctctactgaacaggagtctgcgaagaagagggagagggaaggggttgggtcgaaggggagagagaccgggatgatggagagcagcttgtctgcgctgtggcggccgcgctggcgtccctcgcagcggaaaacggtcgaaactgccagagggacccgcccgacgagcccaagtcggggatcggtcggggctcgcagccgcgcctcggtcacactcgacgcgttcctgtctgactctgacccatggctgacaggacatccattgatggcagagcggagcacaagagaccggggagcagacaggagagacagagccagagaagacaagagtccgtggaagaggaggatgggccgtcacgtgccgaggcgcacgaaacggcgtgcgaggaaggggtctgcgagacgcgtctcttcagaagtaaaagccgtagcccgaccagtcctctgctggcgtcggcgacgacggcaggctcaaggccggcactccgagaccgacaacgaggtcctcgacggcagccgtctgggtcgcagcgccggcaatacggctgctgacgttcgggttgtcgccgccagcgccgacgtcgtgtgggccgtcgctgccgtcaaaggtcggagcgtggtacgatgggccgagctcaaattcgcgcagggccgagaggtcggcctcggccgcagagttgtacgaaacggacgtcttgcggctgacgaccgcgagcggcggcggccgggcagcgacggccggcgcttgctcagccggcgggagcaggttggcgtacgagcggaggatgcggtcgagatcctgcgagctgaagccgaggtagtagccggtcttctggctaagcgaggccggcatggtcgaagaggcaggcggcgtcgtcgacggctggttgtcgaacgcggtcggaacgggctcgaatcccggcgggacccagccggcaacgttcagcggccgctcagtttcggccgtgtagtacgagtgttgatggattgggtgcgtcgagagaaatggcgacggtgggccagagtgctcgtacggccgggggtactcgagtgtagccgaagggcggacatcgtatgccgctgccggccaggacgcccggcccggcggaaccgttccgagttgatggagggcgccgacctgaatagacgacgccgggacgtggaacgacacgttaggcacctcgggcgtcgactctttcgacggcgccgcgctcgaggccgacgagacgtattcggcaccgagcccccagctcggcgcgtacgatccgatgccgggagcgggcgagtagtaacccgagtagacactgctctcggccgaggacgacgacggcgtcgacgagggctcgacgaccgagatcgacgaccggagcgacggcgtcgaggtggctggaaccgccattttggcccgcggccggccggccttcatcgtcggaaccttcttcttgctctgaccgaaggaggccttgtcggcacgcgtgcgcttgccgaggaccgacgacgccgagtatgggttggagcggttgctggtcgacggtggagaggcggaggccgatgagcgttcctctccctcgggcggatggtcgacccggacgcccttgtggaacgactgccactcggcgaccgatacgtagaggcaggcccggcggccggtcctgcagtgcttgcacggctcacctccgcagcatcggatcttgcggtagcggcctggtaaggatgggcaagttggacgcgccgtcagcctcaggcacggccgagcggaagcaaggccgtcggtgacggcaagacgtacagtaggcgcatgcgactccgattcgctgacgggtgctggtcgagccagcgccgtcatcgtcagagcgagaagaagcaggcgcggtcatggttccgacttgcgatgggcatgagacaagagagggtccagtgagccaagctgctggtcgctgtcacgagccaacgcgagcgaccggaccagacgctcacgttgggatggctcgggcagaggaggcgcgaagggcgtcgacggtgatgagcgagggcgatggtcgctgtctgcgttggtaacggttgacctgggcgtttggagattgagctgctgggcgttggtttcggactggacgccagggagagggggaaagggggtcggagacagcgcgaccaggcggcagcgtagacgacgttctttgtagggtctcagtgggcgcgctaggccaggaagcagagggcgctcccgagtacggctgtgcgagagggtgatggtcgcgagatgggaggaagaaacaggcgaccagtctggcgtcgagaggatcaggaagcaggcggcggcgcctcgcgcgagccagccaacagggcgcgcagcagtcgcgagccatagcttctctccgtccgaacgccaggcccaaggagaaagcctctttttgtcgttcgctgctcgtgtcgcgtcagtctggccgctctcggcaggacccggatgagcgaaggtttgatgctgggctggccacgaaagggacgactggtcgcgccggccagcgcgcccaagtcaccgggcccttggtcccgcgccgcctcaccagggggccggacgacgacagcctttcgggcgcggccgctaacctttatcctctaccggcggcagtgctctttgcacgggccgagtgcgtcaagaggcaagcccggtgaggccggccgagaccccaagccggcgccgcacttgcctgcccaaggcgaccgcacttgcgccttggcgccgccaatagctctcgtcctcccgacctgtggagccggggacgcagatcgcgatcgatcaaaggtcacaaaagggagcaggccgcggtgctcactgtgaaggggctcatctatcggaccttgaacacctggacgcgaacctcgggcttgtcgctcgcgctcgcgccgtcgcggaggacctgccagtgaatctcgacgtcgagctcgcgcgagttggtcttcgacttcttcaggctgaaggtgccctcgatggttgagtctgcaaaaaagtcgaacggccggcgcgtgtcagcggagaggcgatgcccggaagctggccgagcgcaaacacagttacgcaccggttgtgacctcgatcggctccttgaggatgaagaccgtctgcttccagtgggtcggcacgcccttgggctgagcgagaaagagggaaggtagtcagcagaggcagcaacagcaatcagcgctcgagacgggcgactcacgccggtcgtgaacgaaacgtcgttcttggcgccgggacggccgtcaatcttgagcgtctcgtcgaagcgctcgaggctgacggaaccctcggcaggcgcacccgagggggtgaagaaggtgtcaaagtaggcgaggaaggcgtgcatcttgccgtccttggtgggccggagcttgaacgacgaatggaagtcgagcgacttaatggtcgaggtcgagatgagaatgtcctgcagcgggaaagcggttgcgcaaagaagtcagcggagtcaacggcgagggaagacggacgttgattacggaccttgatgcagcagtcgtcggtgacgagctccgactcgttcatgatctcgacgagcgagtcctcggtgatctcctcggccatcgcctcaaagtcgaagcctagcgagcgggacgggctttgtcagctcgcagaccctgcgctgcgcagaagagagtcacgaaccgtagacgtctttccagaagccgacccggtcgtgcatgaactcggcgcagtcgacaccgacgagcatgatcttggtctgcgagggcgccataacgccggtcggcttcaggaagcgatcccgggcaacgaggaccgagtcgagcatcgactcgtagaggctgcaaggggcaaaggaggggagtgtcagtcgggctgctcgcacgccgtgtgccttttaaagtgcaggtgcataaggctcacagcctgttgagtagggcaaggatgtcagcgagtgagtcagtgtaagaagcgcgcgagcggcgcacatgtagcccatccactcggagacaatgacgtcgaccttgacgccctctggcagctgaatgtcctcgaccttgccacggacgaccgtgatcgagtcggcgcagccgttgcgcttgatgttctcaatcgccttgacggcgacgtccgaggcgtcaacggcgtagacgtgggaagcgccggcgcgggcgcagaggagcgaaagaatgccggtgccgcagccgacgtcgaggacggtcgcgcccttgaagagctctgggttggagaggatgaagagcgcgtacgacttggtccgcgtcgtgtctgatgaaaaggtgcacgggcgggtcagtatagcgtccaggcagccgacgcgatgaggctgacgcacccttcagcatgatctcgtgaatatctatcgagggcgggcgaggtaagcaccatcataaacgacggcctccaagcaagagtcgcgacccaccgttgtaggcgtagctgtcgaagtagtgcgtgtcgtcatcgcgctccttcttgacaaccacctccttcggcttgtcggcctcggtcgcgaggttgagccgggcggcgagcgtcttgcgcatcaggtcgagctcggccttggccgaggcctcgagcgctgcaatcttctcctcgaggtgccggatccggcgcgtcgcctgcgtcagctcggccgacgagtcggtctgaacagagccggcggcggcagcgttgggcttcggggcagacggcgcagcctcgtcctctgagtcagaccaggcgtcgtccacgacctctgtgataaagaggaacttgaagcggtcagcgctaggattgctctggatacttcgtcaagggcgcacggaggtaggcgtcgttcggcaggacagggatgaggagctcgtccgaggagaggaacgcttctgagccggtcaggctccggaggtcatcgacgctgggggtcttcagatcgagcgagacgccgtcagcgatctattgctgcgcatgacagtgacggcttcattacttacctccttgcggatgtgattgatgaggcggacgcgctggtgaaagtcgagggctgcagaggcatagtcatgaccgaggccggtcaggagtcggcctgcagcgatcaagatacgagcgtcgggacgtaccgagccgggcgacctcggcctcaaggtcccagccgtgctcgcggtcgtcgtaccggattgcctcggcgaccgaggggaacgccttctgctggtcgaacaggctgaaggcctcctgggcctggtcgagctcgtcgaaattgtcgaagttgtcgcactcggcccggtcctggtcatccgaggccgagctgccagaggaggaggccgccgacgacgaagacggacggacggcgtgtgcggccgaagcagggagtctgtaggacatggcaggtacagagagaggtaggggttggctggcagaagaagcaaaggggccgccgagcctgcgtgcttcgccagtcggaggcaggcaatttctggctccgagcttttggcagagcgcagcaggctccgggcggacccgcatggcctcgcggaggagcaagggcggtccacacgaccgatcccggcgaaggccgccttcattccttcttctctcctccaacccccatcaactcttctcagcaagtctcagcgtccggttgccgagcaagcacgatggcggatgactaccgcatctttgcgcgcgacctcttccagcaggccgtctttctccagcccaatctcactagcccggcctccgccctctcctccctcaaccggtccgtctatctcttggttccttcctcgctggcctagggcaggcgtcgttccgttcactaggccagcagatcactcaaggccatcagctgatcttcccttcttccaatcccgactggcgatcgacctacgataggcccgatcacctcctccagcacgtcctgctcgagccgagaacctatctgcctctcgtctccggcctctcgctcgtcgtcttcatcgtccagttccttgtcgccccgcacgtcgccacctggctccgtcagcggcgtcacgcctacaagcccgtctcgtcccggtcgtccgacacttcggcgacgctcgtcggcgatgaggtcgacgcctcgctcgtcgggaccgagatcaagggcctcggctacgtccagcgtagcggtggcgccggcgtcgttgcctggacctttctcaagctgcttgcgctcgtcgcgctcgaggtcctgaccgtcatcgccgccgtaggcgcaaaaggccggcgcgagacggtcgagagctggtgccttgtcggcagcatcggctactgctgcgtgctctcgcttctctcgctcacgatccggccctcggtcgtctcggctaagacgcgtgcgctcaaggctcacctcgttgtcatcctcgtggcaacctggatcatctactttgtccgtgatatctacccgctcgccacctttaccgtcccgacgcaggaccggctcgacgccctgctctgggtccggctcggcctcctcacgttcgccgccgtcgtcgccccgcttttctcgcctcggacgcacatccccgtctcggcgcccttcggcgcgtatgagccgacggccgagcagacggcgtcgctcgtccggctcttcacatttgccttcctcgactctctcatcaagaaggcctggggcctgccctcggtcccgtacgaggacttcccgccgctcgcagacgtcgaccacgccgcctttctccgccagcgcgtcatgcaccagctcgacccgggaagcaccgacgcgcgcgcgccccctcgcggacgacacattggctggcgcatctgccgcgtcttctggcgcgagatcatcctcagcatcgccctctcggcggcctacgccgtcatgcagtttgccgacgtcctcggcgtcaaccagctcctgcgctacattgagactggcggcgagggcgccgtcgctcggccttgggtcagtgccagggatgcccaggcctgcgttaccaaagcggccggctgacctgctggcccttccccttccctcacgatcaggtctgggtcttcctcgtcggcttcggtccctttgcccagtcgtgagtctctcgtgcgcaggtcgccgaacggttcctgccggctgagtcgcttcgctgactttcctgcctgtctcagctcgctctggaatgtcctcatctacctcgtacagcccttcttgccctttcatatcgagctgctggtagcgcaagagctgacctgtaagaaccctcttttgcattcgtttagggcacgcgtctcatggtgagatcgtcgatcggtttgacgctgcttgagcaccttgctgaccactcggatctgctgcacctgatcgcgcgataggtccgtgccgaggcctcgctcgcgctgctccttttcaaccactcgctccggatccagccgcgcgacaaggcccagaaggagggcgaggcggaagactcgtccaagaacctcgtcggccgcatcaactcgcttatgtccgtgctctcgctcgacgactttcgttgcacgcgtcagggactgacgccgtcgatgggcaaaattcaaaggtcgtctgacctgacccagatcatcaacctgcgcgtcgcgatcatctacgtcgtcattgcgcccctcgcttcttgcctttccgcctacttcttgttccgcctccttggtcgggctgccttcgtcgcggtggccctgaccgtcatccagctcccgatcccggccaagttgactatgctgactctcggcgtccaaaaggcaagttgtccttcttcttaccttcttcgcacctgatcgctgactctgaccgacatcttgtctccgtccgcaggcgttcgcgagctccactgacgcgcgggtccagaagatccaggaggccatctcgtcgctccgcatcacgaagctctttggcctcgagacgcaggtcaagaagcagatccaggatctccgcaaggctgagctcgccctcaaccttaagcgcaagatgctccggctgctcctcaacgtcattaacaccatcctgccccttctcaccatgatcgccaccttcgcttggttcaccatcgtcgagaagggcgagctcacggccgccgtcgtcttttcggccatctcggtcttcggcaacttcgcttactcgctccagatgttcatcatgctcacctcttacctggagtcttgggtctcgctcaaccgggtcaacaccttcctccaggagacggagctcatcgaccgctacgaggaaggctcagcgacggccaccagcgatgacccgacctacgtcggcttccggaacgcctcctttgcctggctcaaggacgtccccgccggctccgaggagcgcaacttcaagctccacttcgacggcgaccttcgcttccccgtcggcaagacgtcgctcgtcgccggcccgacgggctgcggcaagacgtcactgttgatggcgcttctcggcgagatgcactttgagcagcgcggccccgactcgtccttcggcctgcctcggaccggtggtgtcgcctacgcctcgcagcagagctggctccagaaccgcacgctccgcgacaacatcgtctttggcgcgccctttgacgaggagcgctacaaactcgtcgtcaaggagtgcgcgcttgagcgcgacttcacgctcttcgacgccggcgactcgaccgaggtcggcgaaaagggcctgacgctttctggcggccagaaggcccgagtgacgctcgctcgagccatctactcgcgcgccgatgtgctgctgctcgacgacattctctcggcgctcgacgtccacacctctaagtttatcgtcgacaacctcctcaagggctcgctcgtcaagaatcgaaccgtcatcctcgtcacgcaccatgttggcctcgcctcgcaggtcgctgactttttggtcacgctcgaggacggtcgcgtcaaatcgcacggcttgatctcggagctgaagcgggttgactcgagcctcttcaaggaggccgaagacgaggagcccgaggaggtcatcgccgccgaggtcgaggccgtcgagggtcctgtcgacgccgcgccggccgagaaaaagtcggacggcaagctgtgagtgactgccaggagtgtgcccgatgatgcctccgctgacgcctgacaacgatgccgcacctcctcagcgttctcgccgaagagaaggctcagggtcacatttcgaagcgggccctcagcctgctcgccaagtcacttggcgggccggtcttctggctcatcgtcatcggcctcatgatcatcaaccaggcggcctccttggcgcaggttgccatcctcggtgcctggtctcacgagtacgacatcaagcctcgcgaggacgtcgtcgttgcctactggctcagtctctacggtgctatcgtcgtcctcgccaccggcacctttgccgtcggtttctgggtctggacgatcggctcggtccgctcgggcgtcttcatccacgagcaactcctcgactcgatctttgccgcgacgatgcgctggctcgactcgaccccacagggtgaggctggcgatctctctcgcgcgaactgaattatggactgactgcctgccttcatccctttcaggccgcatcatctcccgtttcgtctcggacacgaggacgctcgacggcgagctcaccgagttcacccgctcggtccttgacacgaccattgctcttctgatcaagttggcgacgatcgcctttgtcgtcccggtcttcggcctcgccggcatcttcctgggctgcgtgggtgcctttatggccgagctttacatccacgcccagatgagctgcaagcgcgagtcgtcaaacaagaagtctcccctgttctctcatttcggtgacggtaaatagcgacttttccgttcgacctattagcaaattaccgtcactgacgcacgaccttccccacagccatcgccggtctcatctctgtccgggcgtacgactccgaggaggccatgaagaccgaggctgagaagcgctgcgatgcctacgtgcgcactggtgtctcgttctgtgcgtctcccgcccctatcgacctcaacacagccgttttaggctgactaaatctgaccgtctgctacccttagtcaatctcaatcggtgagtctgctcatgcgaccgcgtcaggggcgacgactgactttcgtcgcgcattcccgcagctggtgcaacgttcgccttgacctcctggcgagcatctactcgacactcctcgctacctacctcatctacggtccgacgaagcgtaacgcctcgaccattggcttcatcctcagcgtggtgcgtcagatggcgttgtctggccttggtgctgcttgtctgactcagcaattcgtgccctccttcagtcgatctcgttctcgtcaagtctcctgatgtatgtccggatcctgagtgagtctctttttccactaggctgtcgttttgcgtcgcacccgttctcatgcaaccgtcctgggcccttccctttctagacatgtgggaggtgagtcgagttttgtctggtactgatgcgcgtcatgtcagttctgacggcttcactccgcgccctccgctctccaggtcagcggcaactcgctcgagcgcattcaggactaccttgtcgtcgagtcagaggagaagccgaagccctcgggcgtgccgcccgcttactggccagccagcggctcgatccgtgccgaaggcctcgtcgcgcgctactctgtcggcggaccggttgttctcaagggcatcgacgtcgagatcaagtctggcgagcgggtgggtgtcgttggccggaccggcagcggtgcgtgctgcccaagtcggtgttgcgtgtgaggtgccaggacgctgacctcctctcggcgcttccaggcaaatcgaccctcgctctcgccctcctccggttgatcccgaccgagggcaaggtctacattgacggcattgcgacgagcacgctcaacctcgacgccttgcgctccaagatcaccatcatccctcaggacccaacactgtcagtcggccccctctcctgtcgaggcatccgagctgacctcctgccgtctctcacctgacgacagcttctctggctcactgcgccgcaacctcgacccgtacgacgagcatgaggacgaggtcctgcttgaagtgctcaagtcgtctggcctcgctggcgaggctgcctccaacgacggtaccagcactccgcaccacctgaccctcacctccgagatcagcgtacgttcggtcttcctgcactggtatctcgccgcaagctgattcctgtaaccgtcctgcccacctctcaggctggcggcgagaatctgtcgcagggccagcggcagctcgtctcgctcgcgcgaggtctcgttcggcgctccaagatcttcctattggatgaggttcgttcttgcccttatcagacggcccagcgcaggtcactgaccttctccaactgccattccccttccaggctaccgcttctgtcgactttgcgacggatgctctcatccagcagtcaatccggagcgacttgcagggcgtgacgctcatcactatcggtgcgtcattgcactccgactctacggcagtccggatgccttgctgacagaagagcgctcgtctgcaacagctcaccgcctgcgtacgatcatggactacgacaagattctctgcctcgacgcgggcaaggttgtgagtagtcgacctttctccgctgcgagtctcctcgcgactcgactaacaccccatcttgctggctctcagatcgagttcgacacgcccggcaacctgatcagcgccggcggccagtttgccgacatggtcgccaacagccccgacgccgacgagctcaaacagctcgccactgggcagcactgaggttgtgcggcttgcaggcgcaaattcgttcatccctctctctttcttcactcgcattccttgtaaatctgcatggcccgtcaaattggcatctcgagcgtgagcaaaaggttgccataaaatatcaaatcgtcgagagctcggcacggagggcgcactcgagaggcgtcagagcgtcatccacctccatgcctggaccccaaacgacgtcgaggaccgcccgcgcccagcctgcaaacatcgtcgcacgagagagcgcttgatgcgatccagtgctgcgtgcgggcagcacgatcgaggcgttgagatacacggtgccgagcgaaagaagatgggatcctggagaagagcatcacagcagctggagtcagcaacgagcggagaggatggggcgtaaggagcgtcgggcgtaccgatgagcggggtgtaagggccgtacgccgcccagtagacctcaaggacgtgctcgcctgcgacgccggcgtcgctccagcaaccttcagcgtgtgcatcctcgtacttggttgtcttgcggctgacaatcgcttccgataggccggtcggcgcggccgcgggtagtcgatcgacagggtaaggcggcagcgtttgctggagttggtccaacgtcggccgactcggaagcggcgagaaggccttaggtaacggcggcaggcgaggaacggcggcgcgcgagagaggggtggcgcaggacaagcaaccgcaagtgaatccatacagctcttggagcgacttcttgcgagtcgagcgcgcaagcagcgggtcgagatacgaaatggtcacctagcgagtgtgagagacggagggatcgcaaggtcagcacaaccgcgcaagacttctcgaaactagcccaacgcacctcttcttttgcggcgagggcttgtatgatccggacgccgacccgtggtcgaccctctgcccaggtcgtggtgacgacagccgacggcagacacgagtgattgatggcgcgagacacccgtgcgagcaccgcgttggcgaacggtcggagcgctgcatcgggcgagacgaggacatgattgttgcgctggaagcgggcgtagaggcccgtgagcatcgcctcgtcgatatgagctggcaggagggaggcgagcagccccggtatcgacgagcctgggccgtcggtcgtcgccgctggagcttccataagcgagagaaccagctgactctgcggcaggtcgagcggatcctcgatggcgtctgcgtcccagggcacaccctcctgcgccgtcttgaagtgttccaccgcgaggcgggctaagaggacagcgtcgagacgctcgacgtcggtgacgccatggccgagccggtgcttgagcacgacgagcaccttgcaaaggacgcggtggtgcctcttccacgcctcagcttgacctgcatcaggtgagggaagtggaagcgtcagtcagctagagcaggactgccagcggaacaagcgttcggacgaacagctttgactgcagtaagcgtcctcgaggcagcgcgagcagcgcagcggcttgccgaggaggacacgtaggcagtggtcacagtgacggcccttctcctcctcaagcaaaacaacagccgtcggctcgtcgactagaacaagcgtgccgactggcagagtcatctgcgctatgcagcgcgagcgggagccgtcggccgtcggctccaggacaatggccgagctggtcgaagcggcagcggaggccgtggccggcgcgacggaaggctgagagggggtcatggccggggacgaaagtccatctctagagccacgagtactggggttgctgtgctacgcagacaggagccgagctagcgaccaggagtgcaagaagagtgatggttcgggaggcaaggagcagcgagcctctcgccgtcggttcgacctcgagtcgccacgcgcagccgacctcgcaagttgctttccagggccgctagacatctgcagctggtccattcgatcatgcacaggacgatggcgatagaccttacctggtcgtggttcatatcctctgcctcatccgaagacgcattcgagggagcgctgcgaggatcgctcgaggtcaacctgcagagctgcgcccgccgtcgaggaagcagagcgacgtcccagagacggctcgttcggcgggcgagtggggagggtgaatctgtcttgacgagcactctaggccttctgtcctcgggataaagttagagacaagcagcaggtcagtcaacgcgaccccaacgaggtcaaggacgcggaccagccgcaccttctcagccttggcccgcaacgacttgcgccgcttctgcccggcgttggcaccgccctccgactgctgctgctgcgtcggcggaggaggaggcggcaaggccagcggttttgatgcccgggagaccgtcttggcgaggtccttctgcgccttggttctgggaggggggggcggcagtagcagttgggagcagcggcgtcgaggagcgtcagcctccgagagtgtctagctcctgctaatcggccgacgcagcacgtactggcgcttcatgagcttggctgagcgtcccatggctggcgagaggtggcgagaggtcgctaacgggacaaaggcaggtcgacgttggcggctcgacaggccctggtgtgctcttcatgctcctcacgctgccctcgaccgtttttctgagcggcgacgcccttcgatggcgggttcgtagccctccgctaggtcggcttgcgtcatgtgccaaagtgcgctggatggcaaacttgggggcgtcctcgcgcaatctaaagggcgatgggcatcattaccttctgacgaagaaggaccgagtgcgcacagctgagcaacggcgcaatcgtcgagctgagctggtctgtgggcaaacatctcggtcgagacgctcgtactctgctggacggcccgaaaactttgctgacccatgcttgccaagctgactgacgacgtcgtgcttcaagcagagcgtctgacgggggcgggcagtcaccaagggcatcgctctcaaggccgaacggggtaaccgggtggaggcgagagaggtggaggcaaactacgcagcagctcgacctcgatggccgagcctcggttgattgacgttaactggcaacaaagggctcctcgccagctcgcccttttcttctgttctctcatctcactcccctttccacatcactccagcattccaaccgaccgtgtccattcctcccaacttcgacaaggtccgtcggtcgagagagcgcctcccctccatctctccgctaactgaaaccctctcaccgcagaacacgacgagcgaggaggtcgctgagcacttcaagaccgccattcagagcaagaaaatcctcattactggcgcatcgcccaaaggtctcggcgccgcctttgcccaggccgtcagccggcactcgcccggtctcctcgtcctcgccggccggacgcaaagggcgctcgacgagacaaaggccgagctgctcgaggagacgcccaacctgaaagttcagctcctcaacgtcgagtttgcctcgctcagatcggtccgcaaggccgcggccgaggtgctcgcctacgaggagaacgtcgacgtctttgtcgccaacgccggcgttatggccaccgccgggggcaagatagaggatggtacgccctgcctgatgtcgctcgaaggacggcgacagctgctgacctgatcaaacgttcacgcttgcaggcatcgaaacgcagttcggcgtgaaccacgtcgggccgttccccttctcgaatctcttgctcgagggctcgtccaagcttgcgcccaagcgcatcgtcatcgtttcgtcggccgcccaggagtgctgtccgtaaggcgtcaaccttgagcagccgggctatgtctacggcaagaaggacgcctaccacaagtgagtcgcctacggccagttcaaggcgtcaaacgtcctgctcgctgcagcgcttcaccagcggggtcacgaggtcgtctcgcttcacccgggcgtgatcgaatttccgctcttcaggcacatgaaagaggacgactatcgaagcgtcggtacatcggactgtcgttgaccaccaacggacatgactgacaagtcctgaatcaccagggttcatcaacgaggacgggtcggccaaccctgacatcgagttcaagttggtctctcagggcacggcgacgtacgtccctctctcacctcgactcttttgcttccaagctggcctgactcccatggactcttggtgttgcaggcacatggtggccgccttcgcgccctcggcagctctcttcccggccggaggtccggccccttacctggacgactgccagatcgcgctcgaccacgtcgccccatggcacagggtgttgagcaggaggagaagctctggaaactctcggagcaactcatcggccgcacattcgcttagctaggatatcgatgctcttgtggtaaaagccccttgacttgatcgatcgcatcggcgccgtcgcctcgtcgtcttcagccctcctccgtctcctcctcaccaacccccttcccctccgtccctcaccatcaccttcctcatcatgtccgcccagcttcgcgagctctttgagacgagcaaggctcgtgaccatacggtctttgtctccttcttgaccgccggctttccgacgagggattctaccgtccctctgatgctcgcccttcaaaagggagggaccgacgtgattgagctcggaattcccttcagttatccgattgcatcgacactcgacttgcgaggtgtgaccgactcggtcgacccgtcctcggcaggcggtgagaacggctgatcggccgctgacgtcgagtgcgcgagtgcagccgtgtcgtcagcgtcgtccttgaccggcccaaagactggcggccggtcgtcgtcctcatcctctgggaaaagaagattggcggccggtcgtcgtcatcgtctggcggggaaaagggcttgtcctgcgtggccgccggggcagccggagagaccgagctggcttcggcgctctcgtccggtggggtgaaggcgctgtcctgcgcactctggaaggcaggctgcggcccattgccaacgaccggcgtcggcggctgcaccatgaagccagccggcagctcggcgtcctgctcctcctggatccggaacttggtgagcgagacgcgcctcgaagactcaacccgctcgcggatctgctcgtcagactcgtgccgggccggattctcgttgaccagcacggtccgccggcctggtgagggcagcatgcccggcaagccgggcgagttggcgcggcctgcagtcagctgcgcctggatgttggcccgctcgtcgttcacgactgcaagtgcgtgcaaggaaaggtcagcggactgcagggacagagcgaggcacagagacgtacgcatggagcgcaacggacgagggtcgatgggccgcgtgttgcggcgcgccggcttcggcttgtcgacctcagcccgaggagcggcattgacgccggggaagacgtcgccgtgatggcggatcatgtcggcaacgcacgcggccggagcgcggtcctcgatcgagtgcgacgtgtcggggtctggccggatgatggtccggctgagcgagtagccgagcttcgagaggtacgtctcgtccggctcggcgcttctggtcttgtcaacgaggctgaagggtacacgcccactgagtcagtcgagcccgcgactggcctagcgcgatggtagattcggacgctcaccttcgcagatgactgataatgccgtcgaggatgatgagccggaccttcgggatacgtccgagcaggctcttgagctcctcgacgctctgcgcctgagcctccttgttaccagcgccgatcgacgggtagaccgccttgacgtcgtgttcggggccgagagggacgccgagcccgagcatccagagcctggtaagcgaccggtcagttgactcttacccaaggagaaatgccagggggctacgacgtaccggactggggctgcgatcactagcaagtcgcgccactgaagcacggccgccagcacgtctgccgcgccgttcggcaacgagacgagcgcatcacgtacggaatgagtcgcctggagcggaatctcgttgatccacgtcttgcggcgctctgttcgcaggcgggggaagctagaggtcaggcgaggcctggcatggcctggcatggcgagaggttacgtctggcagtgaccttcgtcgtctggggggcggcgtagccagccttgagccggttgagcagagcccggacgaccgggtggaggagcgcgccgtcctcggcctcctgctccttcttgccaggcagcttccaatcgatgccctcggcccagcgggaaacgtcgccgccaaagacggtgtcaacctcggcgtcggcgaagggctcgtagacgtggaccaggggccggaaggcgcccgtccggtatcgctggataagcgcgtcaaggtccgaggcaggcgggtaggcgtcgagtaggcatcgagtaggcgtcgagcaggaggtcgctcgtctcggacgacggctggagcgcgccagagagagcggcccggaaactgcggcatcagctcggcaatcaggcctccagtcgttcagacatcgactcacgtcacatcagggtagactcgttcaagcccgcgaacggagtctgctaggtgacgagcagtccccggagagcacaagaggtggtcgttgcgggacagagcatcgatccgcctctcgcactcctaacaccacgagccgcgtctgcgcgcgcctcagccagagccgagcctaggccgagccgagagccgccggcttctccttgaccagcacctgcttcttgcttcgcttgcccaaccggctgctcggcagcagcaacacgctactcacgaaaggccacccagtgtgcgttccgcctcctgttccgcctccgttggacgagtcgctgacgcatcctactccggccgctgtcagctgcgcgcggcaacctcgacctccggccgagctggaccctgcctcacatgccgccggcgttgtcgtcaaatgcgcttctcgcccttccagagttcaaagaggccctctcgcccaagtcactggtagcagccggccttccctcgctgccagacctcccgcccgacctttacaaccaagctcggacgcatacaagctggtatggcttccccgcctcgagcttctacgtcggctccggccgagccgccatcaccaccggccctatcgaaggggaaagcgagggcctctatggctcctctgctccggaggtccggagcgaattcgagcggtttgaagtgagtctaaggccgagcttggcgacctgcacgttgctgctgggcaagacgtaccggagcctgaccggccactcgcagtttctcggcgacgccatcttgtcaacatcattagctctgcttatatacgagagatatcctgaggcgtccgagggaaccatgacggtatatgtttaggtcgctgccagcccgctgtcgcccctctgtctgatgacgcgatgctcaactctttacatcaggtcctcaagggcgccctccaggccaacaagacgctcgtcgccatctcacacgcctacaacttgccgagtgtcatgcgcgtccacaactctgccgaggcgatgaagttcaaccccgaccacccggtcgccgccaagctgttcgaggcgttttgtgcgtcgaggctgtctctctctgtcacctcctgacgattgccactgatggtggccgcgcctgtacagtggccgccatccatcttgcgcacggcctggacaaggcgatcgccattattcgcagcatctacgagccagtcatcttgccgacagcctacagcctcttggccgcccacaacgctgcgctcgtcgcgcaagcgcaagcgtccgatacagatccctcctcacaggcgtttgtcaactatgtcggccgcctccaggaatggggcgcccgctcgggcaagcggatagaatatcgcatgctcgcgtcgaagggcggccggaagggcgtgccgctcgtacacattggcgagctctggatcggcggcaacaagaaggccgaggagcgggccgacacggtcaagggcgtccgtcacctgtcggtttcctcctttttctacgctgtgccctctacagtctgccagacactgacctaggctgcctcgctctcaccccggaacagattggcaaagcgcgccatcaaacttgtcgactcaggtgcacgatgaatgtccgtctgggcctgcctttgcgtctggtctcgagcaaggacagaggacgctctctcaggtgctgctgtcgagtgcggtcactcgaaaggtagggcagcctggtgcgaagtcggagaaaatacaaaaggctgtagtcaccctctttccggcgggctcagtagtcgcccgcccattggccctcgagcagccactccctctcctccagcatccgcccacaactcgccaggaacattcatcttgcaaaacaggtgcgcaagacggtctcgctccctgtcggctccgagagcagtcgagacaaggcggtcagggctgacttgctcttgacatcgcgtctctccggtaaggctagtcaccctctctctcgccgacgccagctcgcgacctcgcttcgatataacttagccagcggtctgtcgactcgcagggcttccaaacggacgtgtactcaactatccgagccagctgtatcccgtatcctttcggcaccgtcttcattcctctgccttggcccctgaagacgccttctccgccatggctcccaagcgtaagaacaacctggatatgacggccgaggagcgcatcgagcttcagaagaagcggaaccgcgacaagcaggctgcgctccgggccagacgggcggctcggcttaaggagctggaggaggagaatgcgaagctccagcaggcgggctcgagcggcgggctaagccctggcctggccggttcgaacgcggtcgcagggccatcctcgagctcggagggaagcaaggcgtaccagggcgcggtagaacgactctcggccaagctccggcagttcggcgtctccgaggccgagatcgcagggctcgtccggggcgctccgccgccgtcggctcagccggcctacagccctccgagctgggacgccagtctggtcagcgccgcgggaccgtcgacggcgacgtcttcctccgctggcgagtcgaactgggcatcgtcagagaccatgctgtccgtaggggggccgtcgccgcagcccgagacgccattccccttctccttcgttcgtctctgacctctgctcatggtcgaagcgctcaggctgcccggtactgacccacgccagtaatcacagctcttctcggacaccggtggtttgcgcttagatctcgacatcagctccgaacttggctcggcggtgccgtctcaaggcgcggcccacgccagccgactcgatgctgtgccgcaagtcacggcggcctgctcgagcccgctgacgaggctcacgctacactccgacggccttgtctctatctcgggtgcggccagcgcagtcgccaccggaactacgctgcgatcagaatcgaccgataatctggccagcaaccagtctcccgagcacctgctggcgattgagcaaggcattcaggggctcttcgaccgactcaagcggaggaacaccacaaagctgctcggcgggcgcgaaggtctctttcggaagcaccgaccggtcgagacggcggccgagaaggatgtgcgttcgccccaagcccagaacgctagctcaagtgctgacggttgtctgcccctctattgccctcccctcagatcgcggcgacacagctgctcatcctgcagctgcttggtgccacctcgtcccagagagaggcgtacgatgctcacggcgtcctaagcgcgcatgagcagacactgctcgagaccgaggtatttgaccctcgcgtctattgggtccccaaccctgcgttccgggttcggctcggcgtcgtgcgtctggacctgtcgttctcgcttcgagccggtgaccttgacctgatttcgcctgtcacgacgctcttttgcaggcgcaccagaaacacggcctcaacctgacggccctgatcggcgacctgattgagctcgtctcgctcaaaggcgacgtctgggactggaccgggtggtgcatgcctccgttgtggcagctccagctgccgctcgacgtccagacgggctcgctcttcttcccgggcccgatgaacggctggacgccgcgcgggacggcgctcaggccgttgcccgagtacctcgccggttcgagcatccgcgaggtcatcctcggcctcgagcgtcccggcgcacgcgaggcagggccattcgcgaccacttgcaccgtcgagctcaccgatgtcagctgagacccacccttcaatcacgaccgcacctcccgttcccagttgtataagccatgctacgttcctttctcgatcaggactagccaggggcgagttggtcgctcagagtttacggagcgggaggctggggctctccctcagaccgcgtctgcaaagccaagtgcacgagaaagcgcgtgccgatataagggggggtctaatgcaaaggtccgtgaggaagcaaggggagagagagcaggggcagccgaccgggaatcaagagaaggaaggtgaagcaagcggatctacgacagcgccggcgcggccgaaccgtggagcgggtctgttgggtcctcgccctggacgacctcaacaatctcgagctcggcgtcggcgtcgctctttgagcgcttctccttttcgcgctcgagctgctcgaccgcgaggatcgggtcaaggcttgggtcgggcttgcggtaggagcctccagcctgagagagggcagcgacaaggggtcagcgtcggcgcgaggctggtcacatcgacaggttgacggcagacacgcacccggtccgaccaggtgaagtactggccatagttgacggtgaagtggaggtggtggagcgtgtggtgggacgggccgttgatgacgttctcgagccagtggcccgagatcatgtctgagtcgtggatgaagatcgtccaaatgttaacgatgacgaagactggcgaggacaacgggcggaggtcagcttcgagcgccagagcatgaagcacggagggcgagggacgcacgaccgacgtagagcttcttgtgcagagggaagatcatcgggaagacgtgatacggcagagactggacgtagccgtcgatcgggtggaaggcgaaggcggcccagggcgtcggcactgagattcgatgagtgaagaatgtcagcaagacgaatctttggattcaggcgatcaatgagagcgactcaccgacccacttgtggtggggcttgtggatatgcttgtagagcgccgggtggtgctcaatccggtggatccagtagatgcagaagtcggtaaagaggaggaacatcggaatcgaggccgtgaggtagagccagccgtagtcggaaacattgtcgtaaaaaaggccgccgccgcggacctcgtagacgaaccagggcgtcgtcaagaggatgagccaggggaaggcctggagcgagaagatgatttcttgccggacctggttcttgaggaaccgggggtgattcatcaaccggtggtcgaagatgtagtagtacgagaagccggccatcgtcggatacatgaggaggatcccgacaaagaccatgaggtactgcgagagggcaggagggacgactgtcagcggcctacatactcgctgcgggagaggcgcagtcccggtcgaagaaagcccgactcacgagcgaaatatattgccgcgggatgtagtctcgcggccaggcactgaggccctcgaggctctcggcgattggcagcggcgggtgaggcacgtagctcaggagcgacttgagcccggccgtcgccggagccaacgccgtcccgttgacggcggcggaggcctgctggaccgcagcagggaggaaggacgtcgccggaaggaccttggcgtagaggttgtcaaagacgtagtggtcggcgaggtcgaggaagatctccatcttgatcgagaggaagagaagggcgggaggaggacgaggagcggtcgacgggtgtcgggcgcgagcgctgggtggcgaaaccgaaggctgacagaaacaacaccgaaaggatcgaggggttcagatcagccttctggtcggaggcgcaatgatgcagatcgtggcgtaccttgaggtctgacgatcaggtggttcaggcgggcggtgcttcgatctcgaagggcagcttgttgtgtccgagggaaggatagactgaggacgcgttggcgagggagggcgcaggcgacaggcgggagcctcggtggcggaccggttgctgatcgttcgattcgagccttttagatcggaaggtggaccggtatagacgggcaggagcgcaagaagggacagaaggagccaagtgaaggtgagggggtcgtcgaggactggcagagcggaaggggcgacagacagagtgggacgaccagggcgacgccggggaagccaaaaggccggcggctgtaacaaagtcacgtaaacgcctctgcgccggccggccgaggccggagtgcgcccgcagcgagcgcccgacctgtcatcaacggcctctcctctccgatgcaacgcctctcgtccttcagcaagctcatccctgctacgcactcaaatctcctcccttgcaactaccgcatagccagcatgtcgaccgccgccaaggagcccgtctcgttccccgtcacgccgccggcaggggtacgcttatcgcgagcaccatggacagtggctcccaatcggagctgacgctgtcgtcgctcgaccatccttgcagcatgcaagcccactcggcgaaggcaaatttatccagacggccgcgatgctcgtcatcggcgacgaggttctgaacggcaagaccaaggacagcaactcgagtgcgtctggcgtcgcgacgttagctctcgcgacctctgccgccgcccgcgcgctgacgagctcttcctctccctgccagactactttgcaaagcactgttttgacctcggcatcgagctgaagcggattgaggtcgtgcctgatgaggaggaggacattattgaggctgcgcggcgactcagcaagcgcttcgactgggtcatctcgaccggcggcatcggtgcgtccggaaccttctgaccgtcgcaacagtcagttgtcaagggcaactctggctaacggagcgctctacttttgacggacgctcatcaccaccaggcccgacgcacgacgatatcacctactcgtgcctggccaaggctttcgaccagccgcttgtccggcacgaggagacgctccggcgcatgacggccttcgcggccgagaagtacgacctcacaaagcagacggcagagcagacggccgcgagggagctcatgggcacgctcccggccggcgagcgctcagaggtcttgtttgtcgagagccagaaatgggtcgtgcgttcagacccttccctgctcgacgctgcttgaagctgacgctgatgtgccgccgcctcgttcccagccggtcgtccgactcgacggccgtttctgtgtttatcctggcattccgtctctcttcgtttcgctcctccacgcaacgtcgccctacctcccgctcccgcccacgacctcgaaacccttccggcggctcgtcgcgaccaagctgccagagagctcgatcgcgccgttcttgacgaagctccaggccgaggtcaaggaggagggcatacggatcggatcctgtgcgtagcctgcctgagtccgtcttgcccgagctgaatcatgtgctgacggcttcctcaatcgacaccctgacagaccctgcgttcggcgtcggcgtcaccgtttctctcatcggcaaggatctcgctcgcttgaaagagctcgaaaagaaggtccgtccctggccctgatgtacttgcatggcgaccgctgacccgcattccgttcgaatttgtccaggtcgcagatgagctggagggcaccatcgttgaggccgacgccgcctgatgaaaggctgatgccgtctcgtctctccctgagggaactgtatcgatgcccaccgtctccatgtgaccagaatgattggccccactgccaattattgctcgtcggcggacggatgtcgggcaaggcagtcatcgtgagagagaggacgcatgtacaacggtcggagaggcgcatggagggaggccagcgtaaacgtggaaagcggcgcggattaggatgcgagggatgcgaataggaatcgttctatggggtgaggcaagatgaaggtgattgtgttgagggagcaaaggcgagtggtaggctagcaacgcgaacgggtcaaaagacagagcagacatgcggtgcgagacgtgaaggaatctatagggggatgggattgaaggacaacctcaagcgttcttggcgaattcggcgggctggctggccacctcggaaacgcggcggacgcgcttcgtcgtcgtggcggtcgacttgccctcgccactgttggcggccgcagaggctgctttggccttggccgtcgacgaaccacctttgcgcgacggagcgtctttgcctgggccagagcggtttctacaagaggtggaagcagaatagtcagcgtctgcactggagcatgtgacaaccaaccgagcccgtcgtacctcttcttgatgacatcggtcttgagcgacagcggccggacgacaccatggagcttgtaaaatagtccgcaggcctggtacagtagagtcgagaaaggattagctaaagcggtcgctcaagtcgatcaggttgcgacgcacgttgcagagggggttgccgtctgggtccctgcgccagagcggcgtgttggtcgtgtggcagttgctgcagatggtaggggcgtcgccggaaggccgcggcggcactgctggcggcggcgcgaaaccttcaggcgtgacgctgtcgttgctcgcacccggcgtcggcggcgtcgccttcttctcggccttgaaggtcgcctttttggtctggccgccgaggagcggccccttagggacggccgagctgacggcgagatcggccgggctcgacgactgctcgatgcgctggctgctcgacgcacgcgagaggcccggcgggtcgatcgagggctgaccggactcggaacgcttccggctgctcgacgatgccttggatgaggcgatgggccgcttggtgaccggcggcgtcggggcatggtgtggcgagtcgatcggcgacgggtagttgctgctgagcgtccccgcctggccgcgcgagtcgccgtcgccgtttgacgtcgggcccgaggacgagtcgccggtcgtagcacttccgccaagcacctgggatggattgatatgcgtaaagttggcggcggccgagttgtgagtgcgggcgttggccgaataaaagaggttcatgaggttctgcatgtcagccgcagagtccccgctggacgagaggccgttgccgttcgcatcgccggccgagggcgacgtgcgactcgtgtagttgccgaagccgggcgaggtcgcgcctgagccgggcgacgtgttgctcgatgagaggttctgcgttggcggccagtcggccgggccggcgagtccgtcgttgtcggtcttgggcgtcggcccatcgtgaattgtcgccggcgacgagtcaaactggtggaggcccgtctgatcgccgctggcggcgccgagatcaaagaagccgtcgagattcgaggtgaacgtgaagctggatgatgggaacaggttcgaatcgccaaagtcggttccgtacagactgtcagtcaggccgtcaaattcggacgggtatgtcggctcgccacccggattgaagtcggccgcccgcttttgagactgggggttgaaagtcgcgtcagtgaaggcgctggcaaaagagcgaccgcagtgacgccggcgcattgctcaccagtaggctctcgctccggttgggcctggtcgcatctcgtgccgattgattgcgggtgagcgacggccgggaggccccgccagagtcggacgcgctgttggaagacggcagcgactgcgagtaggtcgtgccggccgtcagatcggtcgacagcgtgtcaaagagcgaggccgtgcggagcgcgtgttgataggacgagccggctgtgtcgtgcgccggcgggccggtcgcggccatctggctcggaaaatggcccggctctgagtaggcgacctcgccattcgtctcaaatagcgagaagccccgggcgtcgttgaagccaaagtcgaggagcgactgggcatgcaagtggccgtgcgtctggttaggcgagagattgaagctcgcgttgttcattgggattgggatcgactgcgagccggcagacgtcgaaggccgctggtcggcgccgtgcgtgccgtagttcttcgtctggttcgggttgaggaagtcgagcgcgccgaggagcgcgtgcgagtgagcctcgttgtgcatccaggcggccggctcgtacgcggccgggaagggcgcgcgcgagcgggaccgcgaggcggcgcgccagtccatcgacattcgcgagcgtgaccggctcttggcccgccaatccatcaggtcgagatcggcgacaggcctgaaagtagacgatggacggtcaggggagaatcagggtctctcttttacgaaaacggacgcactcgttggcaccagtgaagcccgcatcgaagccgacgaccttggctgtcggccgccgtccgcgtccccgaggctcctcctccttcgtccggtgctccgatgacgccgatgactgcgactgccgcgagtgtcgggacaggctcgacacgtgcgaggccgagagcgacgcaagcgagccgtgcgtcggcgagaggagctgctcgagcgcagcctgcgtgtcgagcccggtgtcgaattggtcggcctcctcgttcttgctctccctgagctctttgagaaaacgctcgtcctctccgctgagaggaccaaggccggcctcgagctggtcgagctcctcgcgcctgagagacatggccatcatccgccacgtcaggttgtcgatccgggggccggtcgggtccgacttttgcttggcgtagagcttccagaccttggtcgttgggtgatcgtcagccgcatcgtcgaagccggcgccagcggcgaccgtcggcgaagcgtgctgctggccaggcgtgtcggtggccgagggagagaccgcgaccgaggtcgacgccgagggcgatgtcaccgccgactcggccgtctggctcggctgacgtacatgcgtgacggacgcagagccttgaagaccagccggcttgtcgacgctgtgcaagctgctgttgacgagccccgaggtcgatgacggcagcgggaccggtgccgtccggccggccggatcgcgcccgaagtgaagactgcgattacggccatacgacgaggtagcggggttcatcggcgacggcgcggcggaagagccagctgagcccggcagcgcccaagcatgctgctgctgctcgcccgtcggcgacagggcacccatgccttgcggcccgagccgaaacaagggcgaggcggccgaaccagcaggcgaggccatctcgccgtggccgctggcgcccatactcatgccgatcgacatgccgagccggatagccatcgcaagcgtgtcgttgccatcgaccgaaccgaggccgtcgaacgacgacggcagctggaagctgttctgctgatgctgctgctggtactgctgctgactaaagtcagagccgccgccgactggactctgcatctgaaggtagggcgactggggcggtggcatcgcaaggcctggcgccgacgggaaggcgtacgacgggacaccggcccgaggctcgcgctggccgaggccgccagcagcgccgagggcgaggttgaggttgctcgggccgccgaggctgccgccgttctgctgctgttgccgtggtagctgctgcttcatgaagaggttggcgaatccgccggcctgctgctggccctggccgtcgaagttgagcggcgagcctgggtggaagggcgagcccgggccgggaaatgcatactgcgggagcgagccggtcgtcgcgctgccgtatgactggccgtatgactgcgactgctgctgctgagcctgctgctgctgctgttgctgctgctgctgctgctgctgcatgagaaccgccggggtcgagcttcgcgacgagccagccgagccgacgggcatctgagagtgcgctcccctggcccaatgtgagcccgccggtgtcgcctgcggcgggaacgtcgccccgttgccgtccatggtgcagacgggcgtcgagagatgggatacggtggaggtagaggattgattcggtgccgacaggctcgtccgggtttggtggatccggccaaagcgaggaagagcggaggacgaggagggaagcacgagccgggccgggtcgggcggcgtgggctgaggcagaggccgcggcaaagaggcaagtcagcagtggctggagggaggccgagcgactggctccgacacacctaagcagggaaagtgcgctctctagaggggaggatgcgggtcgtagtgtgcgagcgagcacggcaggaggtcgagctggtcgggggatagagctcaggctcgggcggccggaggcgcaacggccggcgagtcgtttgccaatagggcggctggcgccggctcttttagaacaagggcctgctgcacttgccagagcgactattctgattgccgcgaggcagacggtgcacaggcaaggcagacatgcagacaggattcgtgtagacaaggaaaaagaccaagtgtacagggagcggtgcgcaactttgacacagtcgttgtcgcctataagcgtccgaccgactgagaggcgggctgagtgggatgggcgagtacttgagtggcatggagtgggacgtctgcgaccggacaaacgcctcgacgagcgggcgacagatgctctgacgtcgaagtcgctgagctggagggacgcatccgagccagtgacagccaagccagccgtcgacgagctgccgggtgcgcctccgggctgctgatactggcgtcgccgatgtcgcgaccagactgcgcgacttggtcgggagcgagaaggccggccgggagagagcggtcgcgagatcggcagtcgagagggacccgagcgttgagcgagggagggagaacggtcgttcgaagggaggcgcgtgagctgatcatgagcgagcgagcaagtggtggtcgtgcgtcaacgagcgtcagcgatgcgagtcagcagcagcgcagatggtggcaggctggcaggacggagggtcgccgttgccatcctgcgaacagtcgttggttgttggtgccgacgttattgaaggagggacgagtcggaccatccggttgctgcgctcgattgctgctcgatcccggtcgactgtgaattacaaagcagcagcagtcgctccttgacccgatcgatcgcatcggcgccgtcgcctcgtcgtcttcagccctcctccgtctcctcctcaccaacccccttcccctccgtccctcaccatcaccttcctcatcatgtccgcccagcttcgcgagctctttgagacgagcaaggctcgtgaccatacggtctttgtctccttcttgaccgccggctttccgacgagggattctaccgtccctctgatgctcgcccttcaaaagggagggaccgacgtgattgagctcggaattcccttcagtgatcctatagccgacggtccggctatccagcattcgaacaatgtctgtcccccctctctctgcggtcactttgctcgaaggccgtcctgagcatcgctcgctgacttggtttcgttccactgcgcccggctttctgcgcgacctccttcgcccttcttcgtcgacgactctgcctcctccagatcgcgctccagaacgaggtcacctacgaggtctgcctcgagctcatcactgaggcccgtgcacagggcctcaccgtccccgtcatgctcatgggtgcgcccgcgcgactcgtctggctgaggcctgccttcctcgcgggtccatgacgttgactctggcgaccccacccctcaggatactacaacccgctgctgcactacggcgaggaggctgccgtcgccgacgcccgcaaggccggcgccaatggcttcatcgttgtcgacctcccgcctgaggaggctgtccggttccgcgagatctgcacgagcgacgggtgcgcttgctttgctgtgtctgcgttgcataccagcttcgcacgactgacacgactggaccttcccctttccaacctacagactctcttacgtcccgctgattgcgccttcaacgacggatgcccggattgccttccttgcgacggttgccgactcgttcatctacgtcgtctcgcgcatgggcacgaccggctcgacgacggcgtccaactcggtctcggacgcgctgccggcccagattgcgcgcattaagaagttcacttcgatcccgctcgccgtcggctttggcgtcgcgaccaaggaccacttctcgtacattgcccagacggacgccgagggtgtcgtcatcggctcaaaaataatccagctcgtcggcgacgtcgagggcggcgtcgccgagcgggcgaccgcgctcgaggagtactgccgcgaggtctcgtccgggccgtccaagaaggccgcctcgggcgacctcaaggagattgtcaaggagcaggcaacgaccgtcccggagctcgcagaggtaccgtcagccgaggtcaaggagggccaggacctcgagatcgtccttcccggccgattcggcagctttggtggccagtatgtgcccgagtcgctcgtcgacagcctgagtcagctcgagaaggcccacaaggccgcgctcgccgaccccacggtgcgttctcggtcgggagccagggcttgcgctctacgctgacctcgccttcttgcctggcttcagttctgggaggagttccgcgccgagtacggctacatgaaccggccgtcgaagctctacctggccaagggcctgaccgagcacgctggcggtgcgcgcatttggctcaagcgagaggacctgaaccacactggctcgcacaagatcaacaatgccatcggccaggtcctgctcgcccggcggctcggcaagacgtgcatcattgccgagacgggcgccggccagcacggcgtcgcgacagcgacggcgtgcgccaagtttggcatgaagtgcaaggtttatatgggagccgaggatgtccgccgacaggcgctcaacgtcttccggatcaagatgctcggcggcgatgtcgtcccgtgcacgtcgggctcgcagacgcttaaggatgccatcaacgaggccatgcgggcctgggtcaccgacctcgacacgacccactactgtgtcggctcggcgattggcccccacccgttcccgacaatcgtccgcgacttccagaaggtcattggccaggagatcaagtcgcagctgcacgagctcaagggcaagctgcccgacgccgtcgtcgcttgcgtcggcggcggatcgaacgcgatcggcaccttctacgacttcatcgacgacaagtcggtccgtctgatcggtgtcgaggctggcggcgacggtgtcgagaccgaccggcactcggcgacgctctcgctcggcaagcctggcgtcctccacggcgtcaagacgtacctgctccagagcaaggccggccagatcatcgagacgcactcgatctcgcccggactcgactaccctgtgcgtcccgcgtgaacgtctgcccttgttgttcgcgctgacgcagcctgccctttcccgtatcgacagggtgtcggcccggagcactcgtacctgaaagactcgggtcgggcagagtacacggtcgcgaccgacgagcaggcgctccgcggcttccgggtgtgcacgcagaaggagggcatcatcccaggtgcgtcccgctcgctcgttcaatgcgcacagtcagacgctcgttctgacctgtttcgtgcattctccctccctgctagcgctcgagtcgtcgcacgccatctggggcggcatcgagctcgccaagacgatgggcaaggacgaggacgtcgtcatctgcctctcgggccggggcgacaaggacgtcgaggaggtctaccgtgtcctgcccaagtgggccgagaagctcgactgggtgatctaggggggtacggacgccccgtgtgcggatccgagcgagcgggccggtcgtagcatgactccattgactcatgaacgagcggctgcctcttggaaagtccgactgcaagagcatgaggcggcagcgagaagttccgttgaaagactgttggccgtaggcccaagtagggccgcctggaagcgaactcgctgccgtcgcagagggccgcgcatgccgaacacgacgccccaccttccgactagcatctcgcatctcgtccagcccgcgatccctcccggtcgcccagcatgtcctttgtcctctacggcctgacggcgtacgagctcgtgcttgccttctgtgagcagctccaacaccatccctgacccgcccctctgctcgacctgcatccgcggccgacgcttcgacctcgctctcggctccctctcggctccctcgccggcgtcgtgacccaccggagtgctgatcctactcgtcgactgcttgccctcttcttctcgcctgcagggaaggtcgtcatcgccatcttcttccgcgagatcaggccgcgaggcgccttcaacatcccccgggacggcccggttctcttcgtcgccgccccgcaccacaaccaggtcgggcctgtccttaggctcctcctctatctcctcaagagctgacaattcgttccgtttgtagttcctcgaccctctactgatcgcttccgaggtctaccgcgagaccgggcgcaagacggctaatatcatcgctgccaaggtcggtcctttgtgcttcgcggcatgagtcgagctctcgctcgtgccccggcaaggtacccctcgcgcccctggctagaccgctgatagcctgccttctatccgcttagagtctcaaacgcaagtttgttggtgctgccgctcgggcatttgagtcgagtgcgtctctcggagctgccctgtttggggcgacgcgtcgaggagtcgatcccagcctcccatactgaccgccctcaacacatcgccaactgccagtcggcgtcggacggtcggccgacctcgcttttgccggcaccggcaagatcacgatcgatgagagcgacccgctcgtcgttcgcggcaccggcaccaagttccgcaaggaactcacgccgctcgcgaccgtccagtttagcaaggggctcgagtacgcgtcggcgatcgtcgaggaggtcatcagcgacaccaaggctcggtgcgtccaaagctcgcctacatactctcgtcgccaagctgatctgtatcgtttgacacctcacaggctcaagacggagctcgcgatcaaggactcgacagccgcgcagtcggcgaccgacaaggtccggcaggaggtcgcaaaggtgcggcacagatcatcctcggcggtcgctgaactgccctgctcgatgctgaccgccctctgacggccttgtcccccttgcagaatggtgctcagaccttcaaggtcctccctcacgtcgaccagcaggagatgtacggcagggtctaccggcatctgtcggacggcaagtgtctgtgcatctttcccgagggtccgtcgcgctctctcatagcttgagatcgggccgttcgactgactctgaatgaccttgtgcgctggccccgcgcaggaggctcccacgaccgaaccgatctgcttccgctcaaggccggcgtaacgatcatggccctcggcgcgatggcctccaacccagacctgcgcctgaagatcgtccctgtcggcctgtcgtacttccacgcccacaaattccgcagccgagctgtcgtcgagtttggcgcgccgctcgacatcccggccgagctcgtcagccagttcagccagggcggtaaggacaagcgggccgcgtgcggccagctgctggacgtcatctacgaggcgctcaagacagtcaccctccggacgcccgactttgagaccctcatggtacgtctctggagagactgaaggcctctgagcttgccttttgctgactcctcccggacgaccgtgtgcgcaggtcatccaagccgcccgccgcctgtacaagtctcccggtcagagtctctcgctcggccagattgtcgagctcaacaagcgctttatcgagggctacctgcactatcaggtcagaccagtctgcagctcacgaagtccgagcttttggcagccgtcttacctttgccctttaccctgccgcatagcacgagccccgcgtccaggccctccgcgagcacatcatccgctacaaccgttcgctccgcaacctcggcctccgtgaccaccaggtcgagcgggcgacgcggtctggctggcggacgctcgcgctgctcggctaccgggtcgggctcctgctcacctggagcgtctttgccctgccgggaagcatcttgcacgcgcccatcttcatcaccgccaaggtgatcagccataggaaggccaaaggtccgtcgttcgatgttcttcctttgcgagcttgcgctgacgcaaggtgccgctgttccatcgcagaggccctcgccgcgtcgaccgtcaagattgcagcgcgcgacgtcctcagctcctggaaggttctcgtctcgctcggcctgacgccgtcgatctacatcctgtacacgctcattggcgagtacctcgcctggcgctggtcggcctcgaccaccgtccgctgggcgattccggcctacgtcttcattggcttcccgttcctggccgtcgccgccctcaagtttggagaggccgcgatggacgtcatgaagtcgctcccaccgctcctcatcaacctgactcccggcaacgagaagcagatccagcgcgtcaaggagacgcgcgaggccctctctgaggagctctctggcgtcatcagtgcgtgccgcagtctgccggtcaacgttgctcgtctctcggctgacacgtcagccgtatctccttcacgcgcagtccactttggcccgcagctctttgaggcatgtcgcctcatcgaattgattcaccgtgcctatctgctaacgtcggcgcttatcccttaggacttccacgagaaccgcatcaagccggcgtcgaagccggcttcgtcgagcgcagccaagcggtcgcgcgccgacggcgaaaacatcttctctcacgtgggtagagcgaccattctgcaagcctctaatgaagtgctgatccgggttcctatctttgcttgcagcccatgcgctgggtcgacgagcgcatttttggctggagcggcagtgaccgccggcgggcgccgacctctggcgcgacgagcccaggcctcgacagcggggccgagaccgacgagacggacgacgacgccgactacgaccaggtcatcaacatcctccaccggcactctggtgctgagctcgagacgcccgggagcccgatccgcaaggcccggccgggcaatagccgcggtcagtcatacgccgagcttcagacgctcaagcggacgccgctcgcgacgacgagcgacctgccagctccggtagacgagcagacgccgctgctcaagcagcgcaagaacagcggcgcgccgggcgatgccgagtaagcgactgggtcgagtgcataggcacgagctgttgtccgtcgggttgcgcacgattggagagagattttgttgatgggtcagcgagaggaggggatggcacatgacactgttctgccggttctcgggctcaccgactgagatcctgctgcagattgtgtaccgtcgcttgacggccgactgctgcaaagaaagacggcgccgacgcggcggggcaagggcgggcgcgcggcaggcgcaaaaggttgggccggcagcgagcctgtcgcctcctcctcctcgacgacaccctcactcagccctccttacacttctactacacccgatcccctcaattcatcatggccgacgcacttgtacgtcacccgtccgcgagattcgctcttttgagtggcggacgggaggccggagggctctgcctcctcctccgccgccgtcgccgtcgctgctgctgcctgctcgccagccgctgaccatgtgatgacctgctgttcgcccctgctcgccttgcctcgcccaacccatcgctcaaatcgccatcaatctgtcgcgcgcttcccaaccggctggattgactcgcttgctcttgccatgtcatcttatacgcctccagtctgagggtacgtctggcgcatcgccctgtcacctgccatcagaacggccgagactgacctcggacgctccttctcgaccgatctcacagagcagatctctggtccgtcgcttcgtcgcgcaccggacgcgtagcatccggtcagccgaacgagccggcgatgtgctgactgcccgagctgtttgacgtctgcagagttcaaggaggccttctccctattcgacaagggtacgtctctgcccagctcgctcaagcttcccgaccgcctgtcaagctgacgcgccatcctcgtcgccctctcagacggcgatgggaccatctctgcccgcgagcttggcaccgtcatgcgctcgctcggccagaacccgactgaggccgagctcagcgacatggttaacgaggtcgacgccgacggaaacggcacgatcgacttccctggtgcgtcctgctttggttgagcccatctgggaagcaggcaacaagatcttcacgctgatagcgccttggccttcccgtctggcagagttcctgaccgtgcgtggtgcagcggtttgagctacgtgccctgcataccatctgcgtgctgacgagctcccccgctcctgaccctcttgtagatgatggcacggaagatgcgcgacaccgactcggaggaggagattaaggaggccttcaaggtctttgacaaggacggcaacggcttcatctcggccgccgagcttcggtgcgtccccagttccgacgcatgcgatgtaagttggacgagatcagctgctgacaccgactgcctgcagccacgtcatgaccaacctcggcgagaagctcacgcagtcggaggtcgacgagatgatccgcgaggctgacgtcgacggcgacggccagatcaactacggggtcagtctgcctccctcgttcccccaacctgaacgctcgttgactgactctacaccggcgatggccttgtcgacccttcaggagttcgtcaagatgatgatgtccaactaaggggcgatctagtcctcgcttcctccgccttatgatgcaacggcctctcccttcgatacgtctgctccccctttctaagcgtccaaacgctcttccagccctctctcttgtgctccgcatgaaaatcttctctgcacggcgcgttcaaaaggttggacagcatgatagatttaacgctccatcgagctgtccgcggcgaggatggaggctatgtcgtctccgtacgatcactcctcgccctctttcgcctccgccttgtccgcgctcgccgcaaccgcctggccgacccagttcgggatcgtgctcgctccgccctttgccgccggtgcgctaggcgtcccgctcgtcggctgagggtcccagcgccagcgctcgacggcgaggaaccaacccttgttctcgtcgagcaactgctgctggagcgtgcccccgccgtcggtcgcctcgcggacaatgaggccgccctcaatccactcgaggtcgcgctgacgcatcagcccgccgccgagcggctcaccctcgccgtcgtcaagagcagtgggcgatgccggctgcaggacggtcggcggatccgacttcgggaagatgcggatggaaaggagcgacgttgtcgggctgtcgagccggatgcgatacctgaaaggcaggagggagatgtagatcaggcattgcagaaggaaccaagccgatggaggccccgcacttctcttccgagttctcgagcaccagatccgagtcttgcaggtcgggccgcagcttggtgtacttgggctcggccgcgttacctccctgagcgtccgcctcctcttccggcggctcaatctccgagagctccatcgcttcgatcagagcggcgggtgagtacttatacctgcgaggattggggagcaggtgcggacggtcagtaggaaagctcgaagacgagatgcgcgaggaaattgacaaacccggcgccaccaaagacgttgatgctcagcgtctgttgcgaggcctcatcgacgagctcgtttcgcatctgcaggatctgcgcgattcgcggccgcttggtccgtcgtgacagcatcggcggtcggtcgttctgtgaaggagggccggaaggggtcagcgcttcggcctcgctcccggaagctgacaggcacgcacttcgatccgggagacgttctcaacgatgatgctcgcgccgtcgtggccgttaccccagccgcgactcctgacgccgtgccggtcggtcccgatgaagcgaagtaagcggccgacgactcggagctcaacccggaggccagcctcctttggctgcgtcgatcgcttgcgcttgccatcctccccgacggcggctgcctcgtctgtcaacaccggtgcagggacgatccagccgccgtggacgagcacgccgacaaggtcagaatcgtccgtgtagacctcggtaccccagacgcggcgctcgaggttgattcccgccaggagctgcttccagccctcggttggagccgcatcaagcccctggctggatgtcctcagcgcccagcccgacccgaggtagcccgcagggacgacaacctcgatcttgcctccagagccgttttgaagaccaggcccgggcgtctcggcgagctcggtgcctttgcggctgatgtctgacgggaaaagccactgcgggccgccgtaaacgaagcggccgagaaacggtgcctggcgcgcgagcgtcgtcagcaggaacggcgtccggacctgcgggttgggcaccgcggccagcgacggcaggtcgggctcgtgtcgcccattgacgggcagcgagcccggctggccgaatgacgagctcggcgtaaggctggtcccgagcggccggtttgtcttccggctgctggacggtccgccgcgcattgacgacgtcggcgccggcggctgcggcggatgcatgagggcgtgcgccgcctgaggctgaggctccatcttgacgtcgacggacggccggtggccaccaagctgctgttgctgctgctgagttggcggctgctggccagggacgaacggcggcggccggttgaggacctcgatctgggtccgcttgaccttctcgcgctcggcccgaacgtccttgtccttcttctcttggctctcacgttccttgtcggccgcccaagcctgcggctccgattgataggctcccgaggattgtccgagactcgcaagccgcccatcggcacggtaggcggctgcaccctgctcggcagcagcgaggtggccgtcgcgcttcggcgggcccggagccgagggcgaggcgtacggtccggggaaggcaacgttgttaatcagccgcgagcggtcgtcgtcggccggccgggcgagcacgcctgccggatggtgcttatgctcggcgctgccggctgccgaggaatggctagagccgccgggcgaggcagcgggcaggagggcggcaccgcctgggggacgggctggccgcgacgcgctgccatagggcgagacgaactggggcgacgaggcatcgcctccgagcgccgacgcaggtgacggtggcggcgggaatccgctcattccggcagaaggatgtaaggaggaagaagggaagcaagagtgctaggagcgcaggctcagtgatggcgaggaagggaggtcggggagctaggcacggcagctcgagagcggcggaatgtgctgaagagcctgcgagcgcacaagccgagtcagctggcggctccagcgcgttccctctgagcttcaagcagactgcacgacgaggcggacctggtttgttcgtcagaggggcgagatgaggttcatgggcgaaagccccgctcagcgcgcgcgcgccaggccgaagcgccgctgagggcacggaaaggttcgcacgccgagtgaaccgacaacgtcagcgagggaggagacgagcctacctcgcttactgtcaatcaacatgccggacgagacgacgggggggagtcagaggcgagcgagacgaccgttactcgactcagctgacactgtttcaagcgtcgtcgacgcaaggccgctcaggcgggaaaaaggcagagcaggccggatgacagaagctcgaatcggcatggtatgagcaaggatggcaggaaaagctacggatacaggtgagagtgggacgcgaactgtcgtctagtgaaaaacgacgggagctttggcgcgcgagacgtggtggatctcgcccttgtcgtccgtccacgactgggtcggccggatcgccggggtccattccgtcgacttccagggcttgacgttctcgcggtacatctggtcgacctcctcgagactgaggcctttggtctcggggatgaagaagtagctgttgtgggcgcaaggcagtcagcagtcagcgaccaggttcaaagagtcacgcgcagtcgagcaaaagactcacacgtagaaagcgccgaaaatcaggacgcccgcaaagatcaggaggatgagaggaccgattttttgggcgatacgaggcgcgaagaaagataatcttaaggaggaagggcgatcaggaagaggttgagcgcgggagaagagcggccaagcgcgtacgtacaggaagttccaaaaccagttggtcgccgtgccgagggcaatgcacttggcccggacgcggagcgggaaggactcgccgaggtagacccaaggagtggggccccctttgggaagagaagaaagggaggcagggtcagtccatggaaaggggctgagggcgcgaggggaggacgactcacagaagaacgagaagcacatgatctggaggacggcaaaggcgacgaggacggcacctcccgtcttgttggacgaagtatagagatccttgggcgttccgggtttgggcagcagaaagtggccgacgaggccggcaatgatggcgcaaatcgcctcgaggatagcgccctgataagaagcgagcggatcaggacaagggctccggaggcagccgacgtgggaaagagtaagaaggggggtcacttggaagagcatcttgcggcggccgattttgtcgagcgcccagagagccgggagggtcgcaatgagggagacgccgccgagcatgagctggacctcgagcgaggtcaagttcgtgccagctggctcgaagaaggttggaccatagtagtagtagaagctggagagtaaagagccgtaaattagttgagttggagcagaggagagcgaagatgagcgagaatgcgagcacgcacttctggccgttgagctgctggatgaactggagcatcatgccgtctggagagggaggccgaggcgagtacgtcagcactcgccctaagaggaaacgagtcgagaagaggattcactgatcgtccgcttccagagggcgttgcgcgtcgagaagcattcgagccagccggccttgccaccctcgttctcgactttgatgccgtaggagaggtcgtcaatctcctcctggacgagcgggtcgtcaattgggcagttgttgagtcggcggatggcgtcgcgcgcgccctcgatgttgccgcgggaaagcaggagacgcggcgactcgggcaggtagaggatgccggccatcaaaacgacaccgaagagaagttgcaagccgattggcaattgccatgcgaccggcgtgttgaggtggctcactgtgagaagatgaggagcgtgagtgcaagcgccatcgaagatgaaggagcatggacacaagactcaccagcaatgtctagtgggggagggggtgaagtcgagcgtgagggtcagcgcaaggtaagacagatctccactaaaaggatcactcaccaaggacgtatgagcagaagatgccgaagatgatttggaccttggtgaccgacagagatggtcagctgggatcgagtgtcggtggacaggagacggcgcacctggtacatgacgaggaggaagccgcgcagcgccttgggcgccgcctcgccgttgtacagcggcacgatggccgacatcgcaccgacaccgagaccggcgatgaagcggccgacggtgatctgggcgaggccgctgacgctggacgtctggatggcgacgccaacggtaaagacggccgaccagaagaagatggagcccttgcgaccgaagcggtcggaagtcagggcctgggcgagcgagccaacaaaggtacctgcagaggaaggggcggtgaacgtcagccctgacagcttcagtctctcgagtgacaagggggcggacgtaccggccgagaggagcgaggtgatgatcgactgtcgactgggcgacaggaagtattcgccatcgggaccgatctcaccaaagcggcggatgaagtcgcgctggatgaggagtccagagagaactccgatgtcgtagccgaactgagggaggacggaggggccgagacgatcagctccgacgcccgcgctcgcgcagctcgccctccctccgagctgcccacgacgacgcctggactcacgaggaatcctccaaaggcgacaaacgtgcagaagacgatgaccttgaagttcttgagcaaggcgagcgctgggtggttgggtcgtgagacaaagcggatcaacttcgaagtcgcaggtgggatgacgtcgcgggcttaaaccggcggcactcacgagccatgttgggcgaggcgtctgtgggtcagaggtctgggatagctacctcggcggaggtgatggtgagagagaggaagtcgagagactggccgccgcccctgcctccttgtaagggaataggcccagacgcccagttggttagacggacgactcatccaaggtcaaccggaggcgcaaggcgatcccgtggcgtcgccgtcccttccgaacccctgcagcccggccccctcggacccacttactccctcctcagttcagtcagctctgtaggccctggcaagagtcccctccctgctgctgaccgccatttgtgagcgctgcgaggcagctggcaagagagctcgagaggcgcgctcgtcccttcagccggatcggagggcgatcggcccctttcggcacgcgcgggcgggccggcgaggcaccgcgaaacggctgctggcactcttggtggagctaagctggccatgcgccccattcgggcaagagctgaccggaaagagggacggccggccacagtccactcgacgggcggtgctaaaaacgcgcccacctcgcctctgtcgaccaacacgcccggacgagacggcggcagcgaagacggaggcgggcgagacgactgctggaatcagctggcgctattctgagcgtcgtcgcgcggccgctcatgcaggaaagaggcaggcggtcgcaactcacaggccgggcgacgagagctcatcagcctctctggcaggcggaggccactcggcggagagtctcctccgttcagaagtcgtgaagtcattatgagatctcaaggtcgaaccacccaccgcgacgccgcctttctccgttctacatcctcgttctcgctccggcagggatgggccgcaagtcgagaattgcctcgacccgagcgaggcccttgctcaaggtcatgcggtcgacggcaaaggtgactcgcatccagcccggccggcgctcgttgtaggccgagccaggggctgcatgagagcaccaaagggccaaagacgtcagtcgagcgcactcgtcagctggagaagagagagccggcgactgaccgagatagacgccgccgtcgagcagctgctggaagcctttcttctcctccgcaagcgtcgtccagcccatgcgctcgccgagctggacccagcaaaagtggccggcgttcgagttggcgacgcgaacagcccgccgctcgaaccacgtccggacaagcgcatgtgcgtctgtcagccggcgtcggttctccctgatgaaccagtcgagaaaggtcgcgctcgaggcggtcggcgaccttggcgaagtgaggagggccgagaagaggacgtcggccggcgacgagaccttcatgagcatcgacgtctgggccatcgtccgaatcaggcgcgggttgtgcggcatgacgaggacgccgagccggaggccgttcgagcagaagtctggcgagcggaaagagatgccggtcagtcttcgcgagtgggcggaaggagcggacattttgcgcacccttgctcatgccgtggacgactgcagtcgcggggagcaagcagcgagactgatcagcgtgaggtgtcaagggaagacggaggcacgcgatccgcaccatgcagccgcgacttgtcaaaattgacgcccgtctccttcttgacgtcgaggctgagcatgctcgtaaacggcagggcgtcggtgtaggtcgggttatcatacacgctcagcccgtaaatttcgtctgagacgaggtgaaggtcgtgcttttcggcaaacatgcagtagtcgagcagcgtctggcgcgagtgcgtccggccgtgcgggttagtggggttgcagatgagcatcgcacggatctggacagaccgagcgaagaagcagctcacagcgtcagcctcggggcgagtcatgccaacgcagagtctctcttgcacgcaccttgatacccttggcctcgctctcgcgcaaactcttgccgtaccgcgcatcgacatcgccctcgtcgtcgccatcgacgccctcaagcggcacgccgacgagcacggtacccgaccgcgggcggaggtcgcgcccgaagccggcgtacgtcacctcggacaagaggcagccctcgccggcgtcgacgaggacgtggaagagctggtcaagcagggccgagcagccattgccggtgatgatgtcggtcggcttgatgacggtcgatggggcaaagtgactgtcgcgggccttctcgtcaggcgaggcgtgtgccaagagggcaagagagaagacgcacgtgttgtagaagccggcgagggcatccattagccggcgcgagccccacaggtggtcgccgtacgagaggtcggccatcgtaaacgactccttaaaggcccggccgaagaaggtcatcaactcgtccgccatgaggaagttctcggcgacgccgagcgagatgatgccatccgggttcgtctcggcgtggtagacgtcgttgaagaggcaggcgaacctgcgggcagatcatcgagaaaggtggtcagccgcgctgctggtacgactcgcagaatcgcagtcgattcaagactgtcaggggagcgcacctctcgatgagcgggcccgcgtcgggaccctgagttgcgcgattcgacagcctcggtccggcctgctcctttcgctcgcccgaggccgggtggagcttgtcgaggccatccttgagtgggtggcacgtcaacacgccgtacggcggctggagcgagcgcgggagctcaacagccggagtcgaccgcgcggggacggctgcgcatgtgagcgtgaggaagccgttggcgagctcctggacggatgaccgggctggctgtaggtgctgcatgtcgggtgataaggcagttgcgtcggggaaggctgggggaagggcgcgaggggtgtgggcaaggtggaggctaggcagcaagcgctgagcatgcggcgggctgagtgggtgctgagggccgagggagtgaggagagggatgtggtcgagggcgacagggctgccagcgcacaaacgccctcttgtatccttccgcggcctgcgtgacctcctgactcgcagcctgcctgcagcttgttatcggaatgcgcggcggcggcgacggcggcggccgcccgcagcgtaggcgcgcagccccgaccgggcagtcgcgagtcgcgccggccgcgtgcgccgccagagtccgacggaatcagagccggccgctcgaggccggggtgagcggtggtgggtacgggctggtcggagggtcagtcgggttgaaggaagggtaggcagggccagcctggggctcgatcaggccatgggcgtctgcagtagagcgttcgttgagctcgtggacgagcggagacgtcaagcaggcggtcgcggacgagcctggcagaggtcggggcgccagatgacgagcacgccatgccgaagggagttttggccggtgggctcattatgcccattttggacttttgcaagacagagctgatgtgcgagcgtacgagcgaggtgcacattgctcaggcccgtctctactcgatgaagacagtcggtcaaccctgctgagcaggcggcgggtcagaggggccgaccaactccgtctgtgccaatcttcgcagacagagcgcagggaactcgccaggccgaccctccggtttgccggccgagccacagagaaccacctctgagttctcgacgactaatgccagactctgtcgtcagcaggctatccaggaagagtcatgtagatcgcgcaatacgtttgctttcaacgagggggggggggagacgataaaacagggccgcgcaggccggcgaggggaggcctcctttttctttagtggtggaagaggcggaggttggtgtgggcaaaggccatgccgtactcgtcggcgaccttgatgcactcggcgtccatgatcgagccgccgggggcggcgaggtacgagacgcccgaccgcttggcgcggtggacgttgtccgggaaggggaagaaggcgtccgagccgcaggcgacgcccgagagcttggccatgtgggcctcgcgctcctcggccgagagcggcttgggagcctcagtgaagagggacgaccactgctcgaactcggacggcgacgagttgaacgcggtgccggtaacaaagaggtcaatggcgttggctgcgggacgagcgaaagggtcagcgacggcaccttgtgcacgaaagctctcccaggagagcttacccttgtcggcgcgcttggtgccctgcttgaagggcaggttaaggacccgctcgtgatgccggagccaccagttgtcggccttctcgccggcaagacgcgtgcagtggatgcgcgactgctggccggcaccgaggccgatgacggtgccgttgagggcgtagcagaccgagttggactgcgtgtacttgagcgcaatcgtcgcgacgagcaggtcgagcgcggcctgggtcgggatttccttgttagcggtgacgacgttcttgaagagcgagctgtcaatgatgacgtcgttgcggcgctgctgaagcgagatgccgtagacctggcgggtctcgacgagcgatgggacgtaggtcgggtccatctgaagcagctcggggtcagaagctgtggggacgtcgcgcgacgacaacaagcaggaacgtacctcgagcacgcagtacttgccgcccttcttcttctggagaatctcgagcgcctcgggctcgtagccgggggcaatgacaccgtccgagacctcgcggttgatgatcttggccgtcgcgacgtcgacgacgtggctgaggccgatgaagtcgccgaacgacgacatgcggtcggcgccgcgagcacgggcgtaagcggccgcgagcggcgtcagggcctgcttggcgtagaggtcctcgacgccaaagaccttggcctcaatctcgttgagctggatgccgagggcggcaccggcgggcgagacgtgcttgaacgaggcggcggccgggaggaccgggtccgaggtcgcgcccgagagctccttgacgagcgcatacgagttgagcgcgtcgaggtagttgatgtagccgggcgagccagacaggactaaacgcgagagcaaggacaggtcagcaggctgctagtgccgaggctgcagcttccatgcgcacccttgatcggcaggttgccctcagtgacgaaggcctgagcaggggcctggtgagggttggcaccgtagcggagctgcatccgctggacaccggcgctgctcttggtctcgccgccgagcgtggcgtactgcttgcggaagtagtcggcaatggccgcgtcataatcggccgtctgctcaaaggccttgagcgcgagtccgcgcttcgtctcctcgctgacggcacccttctcgcgccactcggcaaggacggcgtcgtagtcggccggcgacgagaggatcgagacgcggccgtggttcttggccgccgcccggaggagggtgacgcctccaatgtcaatctcctcgattgcgccggggagcgtgcagtcgggcttctcggtctggagcacgaacgggtacagattgcaggcgacgatcgtgatgggcgcgatcgaattggcagcgaggtcggcgaggtcggacggaatgtcgcgcgagaggatgcctgacgaatagtgagaaggcgtcagcttggaaaagagctgcgcaggcgaagcaactgtgagaggacggaccgccgtgaacggcagggtggagcgtcttgacgcggccgccgagcatctcgggcgccttggtaatggacgagacatccctgcaggcgacgacaaaggtcagcgacggcgagcggccgagattaggcgcgctcaaggccgacgagagggaggcaagacgtcggccaggggcggacgcactcgatgggaatgttggcctcgcggatcagcttggccgttccgcccgagccgaggagccggaagccgagctcatgcaggccctgggcgagcgggaggaggcccgtcttgtcgtagaccgagaggagggctgccgagacggagacagagtcggaggcgcggaagacgcgaaagagtcgccagcagtccgtcagcctttcgacagcccgtctcttcatagcacgcacgacgcaccgatgggcttttcctgggcgctagtcatctttggaggcaagggtggttggtagggagagcaaaagggttcggggctggctagctggctggcgtgctggctggcttggtgcgggccaccaggctcctcggccgaaccagcaagtgcgagcagcgcccttcgaattccggccaggggggggggtgtccgctgcgccgacagcaggcaggtcgacctggcagcaacacctcgtcctctagactcacagacccagctcgaaatgaccaacaagaagcatacgatcaagcagctgcagggcaagaaggctgacgtccacccgggctcgcggcgaggtgcgtccccaggaagggcgggagctcgcggccgttgcacccgcagctagcagacctcacccagctgctgacccatggtcctctgccttcgcttgctcgcagccggccagatggaccggatcattctccgcaagtccaagctgaccaaggcgacccagctccggaaccgttcgcgcaagtcggccctcgagcggccgcacttctggtacgactcgctgccggagccgccgttcgaggcgcacacgctcgagagcctccaccggctcgtccaggacctctttctccagcgctgggacgactacctcgaggagctccagaaggcccgccgggcaggccggccaaagtgcaaggagcaggttgaggtcgaggaaatcaagcggcaggaggaggcagagtatgactcgggcttcggtgcgtcccgctgctcgctctcgcgcgcagggcacccgctcctcgagagccgaccaacagagctgcggccggtcggtcggtcgtcgaggaaaggagctctcgctggctctcgaaccgtgctctgccttggctccgctctctgctgacgcttagccttctctcccttttacttgcttggtgacctgtgacggccgccgcagacctgcccgacctgacgcacccgccgacggtcgccctcctccggacatggaacacgaaggacgcctcgttcctcccgctcctgcgcgtgatccgcatctcgcgctgcgagcccgatgtcgtcgtcctcgtccgggctggccaggccaagggcttcaaggagggcggcgagccggcagctgcggccaacggcggcgacgcggagggaggcatggacgtcgacggcgccgcgccgaaaacgcccggggcggtcaagggcctcgagaagggcatgattggccggctgtggcgcgggccgcatgtcgacaagccgtaggcggcgggtcggctctggggcgggttgcgctggacgatatacccctttttctttgctctgagcggatgctcgccagctcgaagtagcagccgcgcttcagtacctttttcgctgactggaccgactgacgagctgctgatcatctctgcaatagctcattctatggtttcgcacttctctcttgggcgcgctccgcctcaggcaccagcttcttcacctctcgccgaagcaagctcgcaacctcgatccgaatgtccttctcgccctcaccgctggcgtcgtctgacaagataccttttgcgactgccgcacgccagtcatcccagactgtattggggtcgagtgcgaggacgcgtcagccggcgcgacgcttcctctcggcgggtcgaaagcaggtggcctcacttggcttcagaacggcgtccagaggctcgccaatgttgacctcgagcgtgcccttgggcactggtcgaggcaggactgcgtgaggagggtcaccgctcgattagtggcaattcgcgcacttagtcccaggcacgacaactcacacgctgggaaccctctcggctcgggcatgaccttgtcgaagccagagatgtgcatcgggatgacctttggcatcgtcgttgctgcgagaaacatccgactcctggaggatcgaaggttgagcgcggtcagcagaaggcctgcttcatagcggcagccgacgccgccggcggcggaaaagcaacttacacgccccagcggaagcgaaacatatggtcgacgtcgtacgtcgggttcaatgacgcctgcgagacacgcccttcgggaaagacgtggacccagtcgccctgcgttagacgtgcagccgagtcggtgatggcaggctggaagatgccgccccagcgatcggtctcgatgacctggccggcgtgaaagaagttggcgtacgtcctgtcgagacagaggtcaactccagattcagcagaggtgagcgacctgggctgttgaggagagaggacggacggatttgtgaacatgatgtcctgagcgccagagacccagcgcgtcttgcgatggttcaggaagtatgcccactaggtcccggtagcgcgccggacgctgatggtcagtcaacacattgcatgcgtggaatgagacgagcagaggcgcacaggcatgatggaccacagctatgagggggagtaggggaggaggtcagctcgtcaagcacgtgcaggcgacagggtttggcggctcgagcccggctggcggctgtcgcaccagaggatcatccatgctgaggtcagtaggatcagcgtcagcgctctactatgctcctgcccgagagaaggcgagctccggaccgacgtacaccgatatatggttcgaaactggcagggtcggaggcggccgtcgtcatcagcctcaagccgggcgagcctcgagtcgacgtgcggacgtactcgtcaggacgccgcgctccctagctttgcccttgctctccttgagcgcgtcgtcgaggtgctcaaagccgttgcaggcgacgccgccgcagccgaggttgacgaacgccttgccggcgaggtggatgccgaccggcgcaaggcgcgagaaggccgacggcttggccgtgatcgaccgcttgaccgccatcgaagcgagccgactcgggcaggaaagagaagcggaagcagccgcgagcaggactgtccccggggcgacgagcgaaagagttgcggttgcgagctggagagcctgtcgaggccagaatcaacgcgcggccgcgtcgtcgttcgtcgtgctggccgcttcggcggagtcgtcttgcttgaccccacgacgcccaccatctctccacccctcctacctgacgatggaggcctcgacgtcctcttatacggccgtaccctacctggacctgcagcccgattacggtcaggtcgtgaacgacgtctcgcgttcggtcgtccggaccgaggcgttctggtgctccggctacctcgaaggccgaccgagcgtccacggcaaggtccgtcccagccatgctggctacgccgtgcccaagctggcagaagggcgctgactgtcggctctggctgtatggcaggtcgtctgcacgcgagacgaggacggtaacctggtcgccaagggtgccgacggcgtcgtcatgagtacacgcgctacgggcaacgacgaggtgcgctcctgccctcgagtgccgaccattgcgagacccagagaggctagatcgttaaatgcccctcgcctctgtcgataggacctcgacgacttcaagatatctgtccccgcgctcgccatcccgccaaccctcgtccgccgaccgcgtctgcgcgtgacgccggccagcttgccgagcgtacgtccgacttgcgggcgagacgccgcgcagcttcgatctgacggtcgctccgcctcgtacagtttccagcccggctgaattcctttgacgtctcgccgactaggccgatcgtcgtccttggcggcgacgacggcgggctcgtcgttcataacttggaggactcgggcgagaaggtgctcgtcctgaagggttgcatcggcgacatcacgcagacccggttctttccctcgggcgaggtgagcttgccgccgtctgaagctgcagagtagcagcctcggctgacacacattggctcgtcctcccggcaggtcatcctctcgaccgcggtcagcggcgtgctctacgtgcatcctgcgctgcgctcgccgaatccggttcccgtccggtcgctcacctcgcacacccggcccgcgacgtgctgcgccatcatcggccggggcaagcacgtcctgtcggggtcgaaggacgggaccgtcaagcggtgggatctcgccgaggcttcggtcgtcgcgagcgcgagctttggccagggcgaggaggtcctggcgatggatctcgagcccgtcgggagcgacaactgccggctctgggtcggcctcggcagtgggcgggtccagctgactggtattgaggagacgagcctgccggcacttgggcctcccgtcgaggtcgccactggagacgccgtcaccgctgtggcttgcagcgtgagtctggtcttcactacgccgctgcgcgagattactcactcgtcggatcgaccttgaagcagcagtccggtacgcctctgctcgctgtcggctcctcgtccggcatcctcgccctgtatgacacgtcctcggcgacagatgtcacgccgccacggctgctcacgcgcctccgccgctcgccggcggaaatcacgtcgtgcgcctggctgccgtcaggcgctctgctcgtcggttctgccgacggcatgccttgggtctgcgccgacggtcgcgggaccacgacggtcgatgctgagggtaatgcgaagggcagcacgtggggggtcgagagcgagctgggcggctgggaggagtcgatcgggcaggtcagggtcggcccggacggccagccatgggtcggcgggcgcgagggggtcggctgctactgatgagtgctgcagagtagtcagagcgctgcaaggccggaagggcacgagatggatgggggagacaagagtgcatcgcagagagaccgagagggaagctagccgagcagtacaagggggacgagagcgggcgaagaagggcagaatgacaatggggcgacagtgggaatgggaggagggcaggaaggagttcttgattattttaaagcgggtagcggaagccgccgtcgatctgggcctggctcgggccggaggcggcggtgcgctcgccgcgctcgagcttgccgttctcgcgcttgaggtaaagcttgaaagcacacgcaaagagaatggcgacgacggcagcagccagattgaccgagaaggccgtgaggtagcggggggggttcttgtacctgaggggcgagaagtcgggaaaagcaccgtcaggaccgcacatcgcaggggaactcagaacttcttcctatactgacaggtaactcgtccagatgttaggcgtactaaaaagaagagagcagagggtgtcagtgtgcgaaaaaagcaaggagttcgcttcagagggagagggatggtatgaggaaaagggaggggaaaaagggccgctgcgcgcgcgttcgcgcgcccctcgcactactcccaatcctcgcgtgccgtgccctggcaaccggacatcgctgtccggttgctggggagcagcagctggtcgggatgtatgaggcgagatgaagcaagaggatttttcggtcgggacatacttgcagatcgagttgatgagcgcgaggacgacggcgcgcttgacggacgggccgctggccgagcccgtgatccacgacagggtcacgatcgcagacgagtagaaggaggcaggcataaggcacattgcgaactagtgaaggcacaaagaagcgcggtggtcagcaggattgctcggcgcacggtcaggctccagtttgcgcgcgaaggacacacgtagcgggcacccgtgttgagcgttgagacggcaatgatgttggcgacctgtaaggcgagactgtgtcagtgccttgcgtctgacctcttcgcgtcttcgaggaattgagggcggaccatagtgaggagcagggggtaaacgacgtgctcaaagcggttgactcgcttgtccgaccatctgccgttgatcaggatgcaaacgatgcagatcaggtagggcggagcggtgctgccgaaagtaaggatgatcagccgagaaaatgtagatgattgtcgcaagagcaggtcgccctttactcacaggcagtaggtgatggtccggttgaagccaagcgtcttcaccacactggggaagaagtttgtgacggctgccgctacataggtgaagaagagcaggccgcaagaaagccacgtcttaggatcggtgcaagccatgagcagagccttgccgacgccgacgtcgccggcgttgtccttctgtccacggtcgacttcgagttcgtggacgaggtgggcccgctccttctctgtgacccagcggcacgactcgaaggtgttgggcagaatgaagacgcaaacggcagcgaaagcaaccgtcacgacaccctcgaggaggaagagcctgatcaggtcgaggggatgtcagctcggaggaagcttaaaaaaggggctcgaggtttcggagactgaccagcgccaaccagcgataccggcagcgccatcgagctcaaggattccaacagccaaaagccctccgaaagcattgccggcttgacttccccttttgttccaaggggtgcaaaacaagggggtcagcctcacgaaaaggctcgcccgcagcagacagtcgccgcgacgcacgagtagaggatggccgtgcggagacccatctgcttcttagtgtaccagcagctgcagaggacgagagacgtcagcctgcctgcgccgcgtgcgcgagattccaatgagtgtcggaccggcgacgcacgaaaggtagtagatggcacccctgagagtcgaagcaaaaattcttcatcaatgcttgtctttgcgcggatgaaacgggagatgggcgacctacgggaagaagacggcctcaacaatgccgaggacgcatcggcagatcgccagggatgcgtagccggtcactgcagcggtgcatgccgagacaacgccccagagagcgcaagcggcgcagatgaagctggcaagtgcgattgtcgtcagccgattgtgattaaagagagacgaggatgccggacgttgcgcccgacgcggtcggcaggcttgacgaggacgtactagctagggtacttgatctttgagatgatcatgttgcctagccagaagtgggaaggtcagcaaacactggtcgaggacgagaatggttttgcccgaaagcaacactgacttggaacctggaatccgatgtagcccgcaaaaagcacactgacacaggtttgatactggacaagtgtcatcccgaggtcggcttcgagaccggcgagtttggccgaggcaatgttctggcggtctgtacaatgcgatcgccagcaagcagcacggtcagcaggcgctacgaggggctgtcgcaatcctccactcaccgaggtagttgaggatgtagagggtgaccatcacgggcatgatgagaatgtcaacctgccgggacgaacgaggggggcggtcagctggggagcgcgcgcgcgagaggcgaggcaagccggctgcgctcaccttgcgcgtcgtcgacttcgcgatgacagcccgttcctcctcagaaagattttcgaggatggctggcgtcgggatgccctgaggggcgacctcgtggtgggcgtaatcggccttgagatcctcatcaaacgaggtggtcttgtggaggtcggccatgatgacggcgatgtggaaagagctataggaggttgctgttcttgacccggctggaagatcaaccacgagggatgagggcgatgttcagacgaggggaagcagctgtggggcaggcgtagagaagagggaccccacctgttgtgcttgaccgagtctttaacgagcttttcgaagcctcgaagggtagccgcaaggaggcgaagagccggccctctgagccgagctgacccggtcccgagcggtggtcgactgaaagcgacgacgaggtcagcccaaggtgaaactctgcgagctgtcgcccgtcgagcagcttgaccgcggccgcatcttgccgtcgtggcctgggcgacggcaaagggcggctttgggcgcgggaacaggcgaggcggtcgcaaaacgccgggctctgctagctgctgctgccgtggcttgcctgctgcatgctgcaggcccgcgacgacgggagcacatcgacgagaacgccacgcccaagtagttgactaccgcctgtaataagcgggtgagcgacgatagcagaccgtcgtcaggctgtagtcggcagttgcgggcagggagggcagctagtcgagatcgaatgctcgacgagcccgacgaggccgatcgccgaacgagatcagtgaacccgccgactcctgcctcgacgtcagcctcccgctcgcaggcgccgacctcctgacgccaactgcctttagcctccacggttacgagtcggccgacgggcaaggggagccagatcagaggaggggggctggccgaggtcggttgtgcacggcaccggacggtggaggcggacgcaagctgaggtaagcgagggtggagacttgtcctggccgttattcacaggcgtacgagttgcagcatggtcagcgggaggcggagaacgagaaagagagagttggctgtcgagagggtcgctttcgagcgctgctgcgctgcctctggctgcggcgacggcctgcgccgacgcctgctctcctccttcgcactgaacgatgacctctgccacgggctctcttgccggcaagaccgcagcagctcggctgccattcctccttagtaggccgacgtcactcgagccgatccggacggcgttcaagcatcggctgggtcaggctgagctgacgttcgtgccctcgcgggagccgccgtcggagggacagcggcgtcaggtctttctcttcctgccgggtgagtcgctgtcctgaacgcctttggcagctgaggcagaaggatgggctgacgctctagatgtatccgcctacaggcaacccaggtgggtagcccttggaggtcgctcgaaggtcgcttcgaccgcagctgacgcggccgcgcgacccacccctggaccaggccttgttcgctattatgacaccttctttgctacgctctcggctccctcgtcggctcttcccccaaccgtcgatctcctcgccatcggccacattggacacggcccaagcctgccaccaccggccgaccttgaggcgctcgacctcgaagcgcaggtcgcggccaaggtcgagctgctcgacgacctgtggtcggtgcttggtgaccatgcggagattgtcgttgggggtcactcagttggctgctggatggctgtcgaggtgcttctgcgtgtagggagggcctcgccatcgtcgccgtcgctgaccatctcgtcgatggtgcacgtcccgcagctgttgaggcgccgcccgcggatccgaagtctcgccctgctgttcccgacgctctcccatatcgccgacacgcccaacggacgtgcgctttgggtaagtcgtctgctacgatctttccctcctcaacccgcgcgcacctgacgccatttgaccgccgcagccaatctttcggccgctctcgatccctctcatcggcttctcgtcatacctcttccgcctggcgccgacgcggctcctgaacctgctcgtaccgccgacaaccgtctcgctcgtccgcagctcgcacgtcatcaaatcggccctcatcctcggtcgatccgagatgtcgaccatcctcgacgccgatctggccttcctcggcgccgagcggcaccgcatctgggcttactacggcaaaaatgacggctgggtcgacgacaaggaggcacgcaagatcacggacgtgctcgaggcggagaacgaggggccttcggcagacgagggcgctatccagaaggtgcgaggttgatcgtttcgcttctcgcgctggcatggttgctgacccgtcgacttcgctcgcaggtctggcactgcgtcgagtcgatccctcatgccttctgcctctgtgagtgccgatcggcctctgccgtgcgaccgctcctcgctgaccgcttgcgttcgcctgccagtgcacggcgacgtcatgggtacgaaggttgccgggttcctgcgccatgccttctcgcagtagacctctctccctgacacatagatacagactagccctttctatccctttctgccgacgatgatctttgacgagcgtgcgccgagatgtcgaagtggcagcacgcgcctgtgacgcgatcgtccccgacgggcaaagccgacgccggcgaccgcactcagcctcaactcttgccgaccaacaccttccctgcaactcttgcatgctccgcctaggcacgaacagctccctactcccacccgtccagcacgtggccgtcgtcggctgtgggacgatcggtctcgctcgtgcgtactccaagccagcgagctcgatctcggccgcacctcgagctctgaacgacccttcgtctgctcttctgtagagatcaagcagctgcttgaccaaggccttgatcgcagccagattgttggatacgaagccagggccgaggtcggcggaacatggtgcgccctgaccagcccaaccgggaacgacgtcgctcacccctgctctgctcgtcccaccgttcaggacgttcgagcccaacccgggagactgcgagctaaggttcacgccatgcggcctcgccgtcgcttcgacagcagcagagaggctcgagggtgccgtcccaccgtcggcgatgtacgagtccttgagaacgaacctacccaagaccgtgtgagtagccgatccaggagctcaggagcccgacgtcagcctcctcgacgtccgtcactgacctctgctctcgccttcttcgcagcatgaacttccgggagcgcgagttccctccagatatcgaccgtttcccgacccacgacgaggtccatcgctacctggtcgagtacgccgacgcatttggtgcgtcgccgtttgcgacctcaagcgattgctgcgcgcagctgttgggctcttgtcaacgtaccctctctgacctcctcgtacatcccttcggcagcgctgaaaccgtgcatacgattctcaaccattgttagacgtctggcgcattcgccgccaggtcagctgcaatggacgatcgagagcgagacgggcggcgtgcgctcgacggaacagttctcccacgtcgtcgtcgccaacggccaccactctgagccgttagtcaatcgttcacggtgaggccatcgacgctcttgctaacccctggtgcttcagtttcattccctacgtgcagggcctgcacaactttcggggccagatgcttcacaggtttgtcaggtcaccccggtattggagctgctctctgacgccagtggcgcttccttagtcgatggtggcgaagcccggcaccttttaaaggcaagaagatactcgtcgttggctctcgagcgtctggcggcgacattacgcacgacctcgcgcttcaaaatctggcgctgccagagcagtcgcccgaccgagcgacgatctaccaatcgacccgagggccgatcgacgacctctttccgaaacctgtcgagcgctggacgcagcaggtgactactctttccgagctggaccatgtcgacgacggcggcgattcgcacttcaaggatggctccgtcctgcgcgatggtgagctcgacgtatgtatttggggcacaggttactcgtacagcgtgccctttgccgacccaacagacgagccttggcgatcacaccccctgatccgaccgaggaagggcggggcaaagccgggcgacctgccagcggacaaggtcgaccactccttgaggccgagaggcggcgcgcagatcgacaaccttgaccctggcttgcagtcgctctacatcccagacccctccgttgccttcatcggtctgggtgagtccctgccctgccatagcatcagatcggaggagcgagattcactgactatgcttcgtcctctcgcctcgccgcagcctacatggtcgtcccttttcgcctttcggaggtccaggcgagagtcatcgctcactcctgggtgacgcagagcctgcctcgagacctgccaccgctcgtctcaaaggacgagaaggtacctctgcacactgtcggctttccaaccgagtctgatgcggcagaccggtggctcaaaggtccgcatcggtgtcgagcatctcagccggtgcctcgctgactcgctcctcccacctatcgtctgctgcagccattggcgagggcgactcgggcgacacttggcatgcgacgactgaggagtggaagcagtcgcgtgcgactgccaaagatcagcgcaaagacctctatggctactgatctacttaggccaggaggggggaaagcatcggcatgaccctattcacgctcgcctctggactgggcgagcgccctagcgttcattttgagatctgtcataaaatcccatcgaccaagatgcccggcaagaaagagagaaagaatatgctacactacccgccgcccgtcgacgggcctccggccgccaagggcctgcgaaacctcgtctgccgaggctcggtcagaccccacgaggcacctaggcggcggcttctgcctcagccgagccgccctcatcgctcacaacaggagtcgtcgagccgatagtcggcgtctttgaccgctcctcgtcgtctgcggctcctgcgttgctccggtcgggtacggccgactcgtcgcgcgagagcgaggcaaagacgggagcgccgattggctcacccccttgctggtcgtctccggcatccggctcgctggccgacgtcgggtgggccgccggcgcctggttgtacatggccgagggagggaacatcgggttgtcctgcgagtggaacattggcgcgccgggagccgtgttcaggtacgggttgaagaagggcggcgagtgaagcggcggcgacatcggccccaggcccggagagaggaattgcgggaaaagcggcggcgtttgctgcggcggatgagaaataggggttcggtcagttgctttgagaaggaagagtgacgttgcggacgaggcgccgtgcgcaccggaaagccgttgtggaactggaagctcggcatgctcggcgtgagcatcggcagccctcggccgtgcatcgggctcatggccccaccagagctcgacgtcccattgctgaacgggtaggccggcggaagcgcgatgcgacctggtgggtggccccggggcgggccgatcggcgacggcaaggggacagacgctcgggtggcgctagcgttgccatttccggcccggcctggttcctcggccgtgctcgacagagtggtcgacgccatctgagcgctcgggtaagaagaaccgaacgctgagcctcctgagaaagtcgccgggaagtagggaaaggacgatggcgggccgtaaccggcaggcgactgcagcgggaggtaaggcgacgttggcgcgtgaaagggcgacggcgggacgtagtaggacgcgtcgtggccgaaggtaggcagccggctgaagctcatgctgagctggccgagttgctgacgggcgtgctgctgctgctgctggcccggctgctgaccgagcgactggccgtatggcgcgtcggctggcggcgggcctgggcgtgagatctcggccgactcgtggtgaacctggagcttgcggccattgagctcgtacctgcggcgcatgacaaaacccagtcagcaagtcaaggcacgataggctgagaatctgcgtgagggacgcaccggtcaaagaggccgatcgcgatctcggcgtcctccttcgagctgtactggaccgagccaaagcctcggctgcggccgtcaccgccgagtgcgacgtttgcccgctgaatgttgcccgccgagcggaagagatccttgaggtcctgccactggacgtgaaacggcaggttgccgacgaacaagactcggccggccagactctcttgattcctcgagactcggccatccactggccggatcggttgagcgtaggccggctgctgggcctggctcaagccattgaaggcagggggcggcggcaggttgccgagcgagcccggcggtggggcccgggcgccggtagtcactgccgagggcagctgcggggacgatctgaggcgcaagctgccggcgaggccgatctcaaggttgcgcatgtcggcctggtgctgcgcgagcgacgacggctggactaagcttgcctttggcgtgagcgcacgcgcgatttgctgctgctggttgtggttgagcagggcagccgagagcgagggtgaagccgatgaggggacggggctcgacgtcgagccggcagtgctgctgagcagattcggctggagcggcatcggcgaggcgatctgatgcgactgcatcggactcgacccgtgtgggaacgaaggtcggccgactccgctgccgttgaaggggctcgcgcttcgcatgccgccgttgctgaagccgtttgcttgcaggccgccgtgcgagtggttgagcagcatgttggcgacgccgtgctgctgctgctgctgctgttgatacatcattgttgacgacgagcccggacgaggcatcggctgctgctgcaccggtgtcgcgtgctgttcgtactccggcggcagccgctcgggccggacctcgaggatgcgcgtctgccaattgtagccgtggaacatctctgcgagcgagcaaagcttggttcagcacgacgccaaagatatgccagttgggaaaagccactcaccgatcgccctcataccgtcttcgcggctgcccatcaggaccatgccgtgtcctgcgcgcgcaaagcagcgcttaagtcagagaggcctgccgtgggagtgcggtttcggcagacgcacctttgctgcggttatctggtccaagggcgacgtcggcgcgcaagacggtaccagcgcggcgcatcaggtccttgaggtcctgccagcggacgcggaaaggcagctgggaaaagggaagactttgttagccgcctgaccacgacacctggccgaccggaggtttcgaccgctcacgttgccgacaaagagcgcgacccgggtgtccccagcgcctccggcgcccgactgcgggtagacaaagttaggcgtgcctgaccgatgccggtcgggagggatgtagcccggcggcggcgagtgagacgtcgcgagggcgatgagcgcctcgatgtcaatgtcggacgccagagacttggtggtcgcggaagaaaggatagaaggtcagcgcctgcatccgcagcctcgcaaagcagcagctctgagaacgagcagcataagtctggctcgggagcgtaagccagcctcgacgttgcgcaacgggtcggctgtcgtgagccgaccgtcgctataaagcgaacgacgcagacctcctgaacctcccctcagagctagacgcaaagagagacgagcggacacaccatgcccgtgcttggggtcgccagctcggagtttcccttgccggctgcctgaggcatcacgggcgctgccccagccccggccgagagcgcttgctgatccggctggccgtcgtcgccgctgcttggcgccatgccgtcgtttgagattccgccaggagagccggccttgcgctccacgggcgtcatcgcagatggcggctgatctgcagccggtctaggggaaggccacgtcgtagcggacgacgaggcggcctgcctgctgccttcgaggaagggctgcggcggcgagccagccggcggcgcgcctgcatcgtccgccaacgcggaggccgacatcgcaggcgcgggtcggtcggtcggtcagacgaaggcgagacagaagaggagagaaggagtcgacggggtcgcctagagtcggtctggcttgcttgcttgggggtcaggggtgaaagggagcgggggggggcaaaggcaagcaggcgatgctggcagcagcccggtcgtcggctcgagcgcaaagggtcgccccgtcggcggcccgcaaacatccgacctcggcactcaacgagacgacgtcgaccaacgcccggcatagcacaggcagcccttcactagaacgccctcatcaacaaggccttcgcgctgagcttctggtttcctttcatgtcatcgtgcgcgcagatgcgctcggccagggcgatgaacgccctactcgtcgtcgtcgctgccgtcctcgtcgcccgagacctcggcgttctcgcgctcgaccttggccatgagggccgcgagctcctggtcctcctgctccgagaccgctttcggctaagggaaagggcgtaggagggcctgtcagcgacttaacttcggacgagggcaggcgcgcacgacgaccgaccttcatcttgacgctcatctcgccgccggcggcgctgatgacacgctcaatctcgacgagcgccttctccatcaggtcgacaccgccgaccttgtccgtgctattgctgctgacaacgtacagcggcggggcgacgaggcggattttgatcggcacggccgcggtcgagacggcctcgcccgcccggagcgcagccttgatcgcgtcgattccctcgtacgagaagcacttgacctcgatgtcggaccggatcttgaccgctttgggcgtcagccggcgggcaatgttgtccttcagcgcctggtggacgtcgtccgagatgtcgagcgcctcgaacacgcggtcctcctcgctgcaggcagggcgacagtcacgagcagaggtcagctgaggtccctctttgagctgcgagcgagagcaccggtcgtcggccgcacctgatcgacagcttgaatgcgtcgtaggcgtggccaaacttggtcccgagcggccaggcgaccttctcgtaaagctcctcgatgtccatctcaagcttgccagcgacgtgcgtcaggactgagttgacgagcttgcccttctcgtacttctcctcgcacttctcgatgtcttccgacgagacacgccgcttcgacaggtcaatgtagcctgagggggaccgacgagccgggcagggtagagggtgataaaagtcagcactctgaagcaaaacgtcctggcgctcgttcgcaagcaccctccgggcaactcaaagcgtggccgacccttgaggcgaagtagtgagggggatgactcgtccaggtcgcaacgagctcggccggctgcagctcggtccctcgtcctgagccacaagctgccctcgccccgctctccctccctttcctctgacaccggcctgctgccacactcgttcccaggcctgtgcgaaggtaggtagaaggacggcgcacccttctccttgtcgacacggaggacaacgacgacctcgttgcggccgacgcgaatgagcttttggatcgatcttatccgccggcgcgacagctccgagaggaggatcatgccctcaatgttgtcgtactcgagctgaggcagtcagtatcggcagaagagggtcagcacgcgaggaggtcggatcgcagcttcacggcagctcgaggcatgaaggtggaggcaacaggaggaaacgcacgagcttgacgtaggcacccatctctgtcggccggccgagcgatcaggggaggcaaccagagcaacccagtcagcaccaggcagctcctctcgccagcgtcaagtcgcggacgaaccggcaatctgcttgacctggaccatgacgagatcgtcgacctcaggaaacttttgagtatagaaccgcatgctgggcgggcctgaagaagggtggaagggaggggaaggctgaaggccaaagcaaggcaatgcagcgaagtcaggcgacgaaactggtgttgagactgcctgcaggacgtacgggagggcgggaggagcggtgtgttcggaggggcggcgagggcgaggagaagagcgacgaaagggacacgggcggccgcccggggggtttagcccagtctggtctctctttgggggaagacgaggccgcctagcgcgcgctcgcaacgcgctctcgacctccctcctctctcgcacccgtcgacgaccatcttgcttgacctccgctcgccccccagctccccgcttgctcgcctgacgatgcctgctgttccgcctaggcggttgccgtccggctcgtcgacgccacggccgatcgacgacctcctgccgccgccgcccaaggcgcagacggtcgccgagcacgcccgcttcgtcctcgcggccgagttcgacatcgacagcggagcgaccatcaggcatcagttcccttacccagtcacgccggctggctcgcactttctcgccgagctcatgcttccggacggcgcccacctccatcggaccgacacgaccgtcttctacctgaatcaagtcgccggcaacatggtcagcgacggcctcctgtcggaggacgaccgctcgtccgaggacgacgacgaccttgcgccggcccgcaggccagatcagcagctatcggtggccaaggaggtcctttacgtcctcaactgcgtcagcctcaaggagaatcaggccgtccggcggtgcgtccgcctgttgcaacggaggtctcgtgcgctcgaatttcctgcgccgagactaacgctcagtccctccgttgtcggtcgccatctgcagcggtgccgaggtcaaggcgctcgccgtatgcttcccgcaccccttcattcaagcctacaagccgctgttgattctcgcgctcgagcactacttcgccgcgccctcggtcgccgtcctctcgcacctctttgacgcgatcaacgcgatcgacacggccggcatgcctcgtttctcgcgctgggagaaatgggtcctccgtgcgaccgaccggcgcgatctgtttgcggagagcttccgagatccgaatcgcagtgcacctctcggcaacggcggcagcgatgacgtcccgaccgactcgcccgtacacgagatggacctcgggaccgtcatcaacccgggctccctctcgaattcctcatcgctctcgtcgctcgtcctctccgaccccccggcgcctccatcgccgccgcccaagggccttccgccgtcgctcgacctctttcaggacgaggcgcagcagcacccgtcgcgcatgggatcgatgtcgtcctacccgccgggccacggccttccttcctctggcggcagcttcagcaacggggactttggtcggcgccagcgcgacacgcacgtctttgagacgagtgcgacgctcgaggggacgacgctgccgatgagcatcccgctcacggcctttcacgaggatgtcggcgaggtgcgcagattccgactgatgccgtcgctcaaccggcgactgaccaacattcttccaacagtactctctcaaagagctcatccgcaagttctcgccctcacctgcacccctctttcccgggcccttcatcggctctttgcacacctctggcgcgagcacgcctcccgttatcctcctgctcaacgcgctcctcacctcgcgtcgtgtcctctttcttggccacaacaaaccagccggtgacgtcgcggcgtacgtgctggccgcatgcgcgctcgcctcgggctcgggcgccgtccttcgcgggttcgcggcccggacgttcccctacaccaacctgatgggcctcgatgtgctcgagcaagtcgaagagctcggcaccggcggctgggtcgccggcgtcaccaacccgcgcttcgaagacctgacgagccgttgggacgtcctctgcaatatcgacagcggccggatcaccgtcagcaaagagtgccgcggcgagcgcgacagcaggggtgtcgacgagggcaaggcgagcgacgtcagtctcgctcggagtcacgggatggacgagctcggcgagtttggcggcctcgacgccagcagcgggagcggtacggccagaggcaagaacggccgaagcgattcgatcgggacgaccggcaaggccggcgccggcgccggcatcgggggcgaccaggacgcgcccttcatggaggaggttggtcgcctcccttttcgttcgtcgatctgacctttgcctgaccgcctgcgcctgcttcctctcggcccagatcaactcgctgatcgaccggcattacggcgagtgcatcatccgcaaccgtatggccgagtacctgctgcactttctccgcttggccgcgcggtacgaggatgagacgtacctgtcgttgccgcagggccgcatctggtacccgacggcgccggccgacctcagccggggcagactcagtgctggcgccgtgctttgggagtttgaggtcgccggcggagatgccgctccgagctcaagttacgtcaatggcacggcagcaacgacggtcaccgcagcaggcgagaagaagcgacgcgagagcgacgttgctggcagcggagggctgggcccggacggcagaaggacggtcgccgagtggatcggcccagcgggtatcaagcggatcgaagcctggcggcggacgcagagctacgagctctggaaggaggtgcgctcacgacgggtctgcctatctttcgaagggtctcggctgacttgccctcgactgactttgcttcagggctttgccgagcaccagaggacaaccaagctctcctttgacttgccgcatcagctggctcgccttcgaagcacgcggccgataccggagcgcgaggccgtcgccatcttccgcacgtttgccactgaagtccaaacgtacgatcaggtcgtcgaggtctgtctcttgccttctgtgccctacgtttgcttttgagcaaagctgacttgctctcgcctcttgcacaggtcctcgcacacacacctcagaaccgcggcggcctgacgccgtttggcttcggcctctttcacccgaaccacgaaatcaaggctgccacagttgactttttcgatacgcttcagcagtacccagtgcgttagacgcagacgcggcggctctggtcgtccctcgctgactcgaaccgcccgctgcagatcggccaagcctttctcctttccctcaatggcttccatcgtctcgcctacaagcggctgtcggacgaacgctccgaagccgtcatcgcgcagattgaccaagcccggcaggctgccggcctgtcctcaccgatcgcaggccaatacgccgagagtgctgaccaggctgccgtaggactcggcatgaacggtgcaggcctctgaccctgagcagcccgcctttcgccagcaggctcactagactgagcggcaacagtcgttgccctacatgaccgcactcccctttacgaatctgcatgaccctcacgactccggccagcatgtcaacgcggctggcgttctcgttgaccttcactggcctccgctggcagtgctgacgtctcgagctgcgatctcgcgcgagcccgggtcggggcgggcaatcctggcataggttgagctggcgccccttctgagggtgtgcgcaaggtgggcagcagcagtgggctgaacttaaatcaagggggcacccgttgctgcggctgcgggggtcggctcggccgccggcgcgggcgccgggtgcgatcgaacgtgcagcgactcacaaggttcagcctgcggacgcgcccgcacgctcgggccgacgcgactgctcttcactcaactcctttgcttctttgacccaccgctgctgcggctccgggacgcgcgggtccgctggattcagtcgcagagagagctgacaacgcgtgcagcctgtctcggacgcgtgccctcacggtgagggccttgctgcttggcttggacgcgcgcttgctggccgcctgcctgctaagacgcgctgactgcccacccagcagcggagcagtttgcctgaggctggtctgcaatcccttgtctcgggaaggtgtgtctacgcgaagggggctttccccttgactggctgcacgcgaagggggtcgaccaactctacggcggcacgccgccgcgaaggtcagacgtgccgttgcccacactagaggtcggaagaagcctctcgctcggtgccggctaccgatccgctgcaacggctcgccgcaggcaacagcgttcccctcaccttcgcttcgtctgaacacccgccgctcccctggacccttccgcttgactgacccacctcagcacgctctccttcttcttcttctcagcacatgagagcagaccttgagggttataaaggcctcgcctggaagcgcactttctcttcttcccctcatcgtccatcgcctcgcctcatctcctcgcctgctcccccgcctcatctgcccccgcctctccctcgctctcctttcccacgaccctcctctcctccctcgactgtccaatatgcgcttccgctccatcgtctgcgccctcacgggcgtcctgggcctgctctcaccggccatcgcctcgcccacgccggcaaaatttcaagcgctcagccagctcaacatccctcggacatccctgactgaacgcgccctcgccgacctgaacctctgcgtacgtcgcgcccagtcgcttgcgtcaacagctgtcggctgaccgctcgatgatttgcaggtttcactcgaggtcaaaatcaacctgaccgaccttctcaatggcatcaagattgacgtggaggctcagaccccgccgtcgggaggaggcctcatcggaggactcattggaggtgtcatcaacgctgtcggtggcgtcgtcgacggcctcgtcgggacgctcactcagattctcgccgacctgacccgcttcatcgggctgaacctggaagtcgacctcggtaaggcctgcgccatttaccacgagaggcggcattcacgttgctgacgtccgtctctcccctccaggcacgctctgcctctgtctcggtacgcctctgttcctcgaccaagccttctgcaggccctacgctgacgtccctccccccccccgcccccctttccccggactgtagatgccggcgttctgacacctggctcgctggctcaggttaccgccattgccggcccacagttcaacagcggtgttctgggcgaggttgccaagctcagttagtcggcgcctatgactctgccgctgtgtggatgttcaactgacgccctgtttttcgctcttgcagtccccggtatcgtcgaccttgttgtccttctcgtcgcccctatcatcgagaccaaggcggcggaggcaccggtctgcccgagcttccccgccgaagcgatcccgctgcccgatggcgccacttgcggctcgagctgcctcttcggtgcgtcgagatgtcgggcgggcaaaggcatgcgactttcatctgactcgccttgtcttcatccgtccagcctgtccgacgggtctcaagccctgcgaccggagatgcattgccgagagcgcaacctgctgccctctcgaccagaaggactgcggcaacggccaatgcgttcccattgacaacatgtgcccctccgccgccatgactgtccagcggcggtcggtcaaggagcgctctcgctacgcctgccggcagccgctctcggcctgcccagtctcgcacttgctcgcccgggatggctcgtcagtcgccggcgccggcttcgaatgcctcgacacgctcgccaacatcgagtcgtgcggcggctgcatctcgcccttcaagggcaacgtcgccggccaggactgcacggcgatcgccaacgctgacgacgtcgcctgcgccggtggaacctgcatcgtcggctcgtgcgtcgccggctttgtgccctcggccgatggctcggcctgcgttaactcgtcgagcggcgcccggcgcccgctcaagagccgcaagtcgcgcaactagacctcggccgctcgtctcgcctctgtacccggtgtctctcctaatctcgccctttatacccaagacaccccgaccgtctctcatgtcgactgaaaattacaaagcttgctactctcgacctccgactgacgcgctgacatccaatccggttcagcgtctgacactcaaccggcgatccttgagggccgacaccaccgactctccctctgcggaagccttgctagcgagccacctcacgacgtctgagccgactcgcatccgcccctgaccgacttgctttcgcgctagcggttgtcaggtcgagaagtgatcggtgagtgggcaagccctctttgacagcactcgcccgagctgaccttcgtcacctccctcccttgctgttctcggcctggccttcagattttagtcttccctgcacctactcagaagccttgccgttggctgcttcccaagcttgtgaatttcacgcatcgttccgagccgccggtcaagaccggtggctcccgctgacgtcccgccaacgaccgcccctttagactctcgtttctcccggcgacccccgaccgccgcccgtcctcaaaggtaagggctactcaccctcctccttgagcagtcgataccgttcgagtcgatccgcgcacgtcaagacggccgatcgggtctgttgccccttccgccctcaccacacccgcactcgccgatgccttccgcctcccttcaactgcccgaatgcggcttcgaagactttcgtgcctcgctagaagtgctgtagagactccgggcggcctagcctcctccacacggcgcgcgtgtaggcggttgtcgccaccgcttccgacccgcactggcacatccgcttgccgctccgaccatccgtttgtcgccatgctaggaaaacctcttttcgaggccttcgtcgccattcttaaaggacagacttctcggtcagtccattgtctgctcatacccgtcactcttcgctccacctaaccgtcctcgtccttgccctcccttttgcacgccgacactcttcacccatctcaacctcccccctgcatattctccggcacccctatcatgcgcctttcgaaggtcaccgccggccttacgctcctcttttgctcggctaggacgctcgcttcgccgacccctgtcgactggtcctcgatcccagagacgagcctcaccaagcgcgtccccttggtgcaggtcccagtttgtgtacgtcgccaacgtaaccaaagagactaagattctcagctgactttcctcttcgcccccaggtgagcgtcgacctggataatcagctcaacctcaacctagtcattggcgaactcggcaccttgctacaacttgcggtcaacggcgcccttctgacgctcggcatcgacctcgacgacgtcgctctcgggctcggcactgcttgtctctgtctgcgtcagtcctcggtcatcctcggctgcttcaactggactcaagacgccctctgaccgttgctcctccgacccttgcgcattcgcagagggcgacgtcatcaaccccgataacgtcttgaccgtccgagatcagctcatcagcggttccggtgttcttggcggcgtcgtcggcctcgttccgacattgggtgagtccgcaaccgatccagccctcggccttcgaagccgatcctgacctttgttttcacccgcagccaaccctcttctggacgccctctcacccgtcctcaacgggcttctgatccagcgtcgggagttcctggctggctcttgccccgccgggccgaccggctccgttcctcgtcctgtccctgcggaccagtgccagcccgacggagactgccccatcttcggttcgttccacctgtgacttgataggcatccgtcaagactctggctgacacgtacctgcctcttttcgcagactgcccggccagcctgcctcagaactgccccgtccgcaacgagtgtcttgcagcgggcgccgactgctgccctgacggccagtacctgtgcgggacgacctgaatcgtcatcggccggggctgcgagtcgggcgtcccgcagcgaaagcggtcaatccaggagcgctcgcgctacgcctgccggcagccgctctcggcctgcccggtctcgcacttccttgcagggacggccgcctttggcggcggcttcgagtgcgtcgacacgacggccgacatcgagtcgtgtatgtaccccttccccctctcgtcctcgaggcatgagtcaagactgaagctcatccctgccttacctcaggtggcggctgcatcacgcctttcaggggcaacgccgccggccaggactgcacggccctcgcccacgtcgccgacgtcacgtgcgaaggcggccggtgcgttgtcagctcgtgcctggccggcttccagccgacgccggacgcgagcgcgtgcgaggccaagaaccgcttcagtgcagcccggcttcaggtccagagcaagcggcagaagcgacagagctgagcgcccaagtcgcccgtcttccttctctgccgttgctcgccccctcgtctctctcttctgcatcagccttcccgcggacactcccccctcttcctgctcctaaccgacccaacatacagccgcgcctttgcctctcctcccttgtgtcttccaatgtcaagctaccaacctctgcctgatacacccttctgccttaacctcgtttctcgctgatcctccctccttgcccttcggccaatgacgcagagctcgcgcgcgccgccgagcggcctgctctggcgctggttaccatcggccggtgctgatcgatttcaacaccgcctatccgacgctcactctaacccgcgagtccctccgcgagcgtgcgccgttgacgctcacctctgccgcgttcgggatgtcgcgcgtgatgcgcggtgctccttcgacgcgcggcggtttcggagggagcgctcgatcgccattctttttatatttttcactgcggccctaggggcatcgcgcgccttggctctggtagcagagagcaacggcggtctcgccaacgacggcgaagcagcaagctctgctccacgcactcgtcgacgcctcgtccacgcgcaggcaggacgcgtcggctcgtcttcacgcacgatcgagtgcgactatgctcgggctgacgcgccgatagacgcgaacccctccggcgagcctcgcaccctccgcgctgaccgccgacgctcctctgcactgcaaagcacagcgcgctgatcgcaggcagcagagagaggcctataagaaggcccgggagaggtctgctggtccctgttctctctcctcatccgcctctcctcctctgcctcgcccttctctcctgcccacccgagctagccctggccgcccttccttcaccggcttaccccctcccagacctcagctatgctcatttccaagatcttcaccggcctcgcgctcctctccgcttcggccacgactctcgcctcgcccactcctgtccacttctccaagatcgagaggactagcctgactaagagggccgtccccttggtgcaggtcccagtttgtgtacgtcgcccgcataaccaacgagactaagatggtctgctgactttcctcttcgccctcaggtgggcgtcgacctcgagaaccagctcgacctcaacctagtcattggcaacctcggccccgcggtgaaacttttggtccgcggcgccctcacgacgctcaacatcaacctcaacgacgtcgctctcgggctcggcactgcttgtctctgtctgcgtcagtcctcggtcatcctcggctgcttcaactggactcaagacgccctctgaccgttgctcctccgacccttgcgcattcgcagagggcgacgtcatcaaccccgataacgttttgaccgtccgagatcagctcatcagcggttccggtgttcttggcggcgtcgtcggcctcgttccgacattgggtgagtccgcaaccgatccagccctcggccttcgaagccgatcctgacctttgttttcacccgcagccaaccctcttctggacgccctctcacccgtcctcaacgggcttctgatccagcgtcgggagttcctggctggctcttgccccgccgggccgaccggctccgttcctcgtcctgtccctgcggaccagtgccagcccgacggagactgccccatcttcggttcgttccacctgtgacttgataggcatccgccaagactgtgattgacacgtacctgcctcttttcgcagactgcccggccagcctgcctcaggactgccccgttcggaacgagtgcattgccgagagcgcaacctgctgccctctcgaccagaaggactgcggcaacggccaatgcgttcccattgacaacatgtgcccctccgccgccatgactgtccagcggcggtcggtcaaggagcgctctcgctacgcctgccggcagccgctctcggcctgcccagtctcgcacttgctcgcccgggatggctcgtcagtcgccggcgccggcttcgaatgcctcgacacgctcgccaacatcgagtcgtgcggcggctgcatctcgcccttcaagggcaacgtcgccggccaggactgcacggcgatcgccaacgccgacgacgtcgcctgcgctgctggaacctgcatcgtcggctcgtgcgttgctggctttgtgccctcggccgatggctcagcctgcgtcgcctcgtcgagtggcgcccggttctctattcagggcttcaagtaaatggcagtctggcctagccgcgccttctgtcccttctttagcctgtaaaactatacccacgtcctctctctcacacacgacacactagagtgctcttctcatccttctgacacggcctgcgcgccacacgaacatctctttcttgtctgctcttattcactgcaatagtatcagtacgataatgatgccccgtcaaaatcgatcctcttctctctctgcttccagtccttgctcgcacgacgccgagcttcttccacttcatctttatcgccctggacgacccgtccagctctctgcgtccttcgcctctcatacccagcctcgcgacgtcattgacgttgtcgctgatcctgctcaggacgcatctataggtcaaaggcccgtctaagctacctcggcagggcagaacctcgctgcgcatcgagcgagccgtcccgatcggcaagctcatagtcggacgcctccggaagcaccggcgtcgagatggggcttattggccggccgaagcgaaagaggccggtcgcccagtcccaggcctcctcgagcacgccctcgagcccgacccgctcctcccactggcgctcctgccaagccagcggcgaggcggcgtcgtgctcgtgctccattgtcgcctcgtgccgtaggacgtccttgaccgtcacaagcccgacgagcttgccctcatgcgttacgaggatgacacgaggcctgcggaagaaagcgcaaagtcagcatgctggttttcatctcgaggctacagcacaaagggaacgaaccccatccggcgaaagagttgcatgacaatctcgagtgggagcttctccgagacgcagaggggcgtctgacgaaggattagagcgtcagcaaagcctagagaggccggtacgggccaggcggcgcacctggtcaacataggcgccaaagtcggcccgatggcttccatgcgcgtcctccgtcagtgcctcttcgagctcgttctcggcgtcccactcccagccgtcggcctcgccaggctggcgattcgagggcgctccggccatcactgactccgagtgtcgatagaggtgcgacgagtcgacgtccgacatgcggaacgtgcagatcgcgtcgggcgagaggtgcgtcgtccgcttggctttgtctaacgagcagagcagcgagggtttaggtcagcccttgcctcaaaagacggccaaggccacagaacgcaccagacgcaaagcgcaactcggcacggcggatgtagccaacgacggtcgcgtcactacccgacttgacgacagggaagccttggagcgggcttgagctcaagacgtgctcaatctccgagagagcgacgccagaggccttcatggcgatgatctcgcgcttcatgatgttgcgaactgaaagcacgagtgatagcacgcatcagcaacccagacgaagcagaagcgcgaggtcgaaggcgcactgggttgcaggaaggcgtcgtcgttgccctccgagtcctccttctcgaggaaggggtagccgttgagcttgatcatctggtcggcgatgccacccttgccgaatgaatcgccgacggccttggcgacgaggacgacaatctgagcaataccgggcggatggtcagtgatggacgagagtctgcagagccaagaatgagacggaccatcgtcggcaagacgtagtcaagagcgcctgtgacttcgaacatgatgacaacgacagtgacggtcatacgagtgacgccgctgtatagcgaatgggcaggcggtcagcatgggatctctaccaaagggaggctcggacggagcgcaccagagggcggcggcggcgccgagcaaggcgtaggtacctggcgtgatgcacggcacgtcgggggagcagacgcctccaaaccaagaggactctgggttggcactgatgagagaggtcttagggtcagccgcttccaatctattgagaggagcaagcagcaacgtacgcgtgcatcgccttcgagatgatgccaatcatgcggccaaaagtcgcgccgacggccatcgacgggacaaagatgccggccgggaccttgcagccgtacgagaggataatgaagcccgtgcgaacgactgtcgcaagcaggagcgtgttgacgttccgccattgggcccacgtcctgcaggtcgtccctcgagtcagctcgcgcgaagccaatcgcagtcagccggcatcatacacactggcagaggttgtcgtagtcgccgccaccctcgcactccttgaagaggatcgccatgctctcggtcatgtcgatgcgaaggaatttgttgaagtaggagacgagcgcggtcgctgctgacaggaccacggcctcggtgatgccgtggcctgaaagatgcttgcgccggaaggacgcgacttgcagattgtacttgacgacgaaagcaccgtagaggccctgaggaatcgaaagtacaggggaggtcggtcgtcagctcgctggtaattgtcgtctcgtgccgggctacgagaagacgtacgccgaagatgccgatcaggataaacattgggatctcgaagtagtgccagccgcggtcgtaagagacctggaacaggacgagcttgccggtccggtaggggttcatggcctagtaggatgctggagcggtcaggagacggtcgagagacagggcgaccagggactacgtaccgagagcgtgacgacggcgaccaaagcgcagacaaacgatttccacatcgtcttgttggtgaagttgtggctcatttcctgtagcagtaggtggcagggtcagtcagccgcaggtcgagcaaattacggcagacgggcgggccacacctcaatcgcaaagagcacgccgccgatcggcgaaccgaaagcgacggcaacaccagccgcactggcggcggtcaggatttcgcccatcttggctgtcgaggcgggtcctagtgtcagtctgtcggcagccggcgattgcagcccggcggacgcactgtggctcgtcgcgaagcgctcaaagaagccgccgatgacgttcccgacgcagcaggccatgtgaaccgagggaccctccttcccgaccgagagtccagaggcgatggcgagcggctgcggagacatcaggtcgaaggcgggcgtgagcggtcgggtgcgaagccgtcggacaagagcatgcagaggcttgactcaccagggcgagactcttgataatgagggtccaggtgcccagatagcccttgatgactatcgcaggaggcgaggtgggtaaatcagatgcgggctgacggaacgtgagggcttggcgagagacaggacgcaccgaagccgccgaggatgcacttgatctcggagattcccgatccagcggcgtacggcgcgaacgccttcacgagttgggcggccgtgagcgagaaccagatctacaagcagagcgttgcgtactctctgtcagtgtgcgctcgggtgccactggctgcgacaagggcgacgactcacggcgcacgtcacgtagacgaaccaagcaacaggcccgccgccgccccactcgtggtagtcggcgcacgtcgagccgtcggcgccgtcgtcggccccgaggcagcagaacttctccttgagccaccagcccgaggtgcagtagccgagcttgatcgaggcgagccactcggtcaggatcgagatgagggcggcaatcaggccgatggcggcgcctgcgggaaccggacccgcagcagagagagcatggcagcgagtcaagagcatggcagcgagtcagcttgatgcaaactgtgcttgatggtcggcggacgcaccgacggcgctgacgacgagccagtcctcgccgtcgctgaggacggtgagggtgaagtgccagagccaggcgagcgtgtcctcgacggcgcggacccgcgggatgaagcggctcgacggcatcggcgggatccgcgaagagccccgccggacgtgcacggtccgctcgtgcagggaatcctggatccagtctgtgagcggaagagaagggaggagggccggcggcgggttcagccctcggctctctgaccggtcaaaggggcgcaggcgagctctcgagctcaccgacggtcgagaagtcctcgtaacgcctgtcgcagaggacagggatgtcagccgctgagattcggcctgcctgagattactactgcccggagtgatgcacctgatctgctcgatctgctcctcgtcgtgggcttgctcgtcctcgtcgcgggccgccgacggcgtcggggcgtcggccgcggcgccactctgcaggtggacggccggcatgcaaaggggaagattgcttctgcgtcgagccttcggtcgacgttcgctagagcttcacccgcttgggatgggcctcgagatacgaagaagggggggaagggagtctgggcgaggcaagctcgggtcggcgtcctgggcctgaggcgggagggccgccggcagtgaggatctctgccggcgtcgcgcgcgcgagctcagacaggcacgaccgcttcgacctccttgagcctgcctcatagcaaacacagtttggatgtcgacagcgagcagcgatgctcctgcatgcgataggccgacgcactaaagagctcgaggatgaattgcttcgagctcgactcttgtctggtccggcacgcgcctgcgattgaatgacgctccgggcgcgaggcgcgtcggtcagcccgcccgcccgccggacgacgcgcctcgaatcctgtcgctgcccgtctctcgaccaaccacgacccccgccagtccccctcagaccttgcccgggccatacgtacccctgccgtctcgcttccaggatgggacccaggtcgtcggccgcttcgccaaagctcatccatcgtacgtcacctagtgcgaaccaggcgcgtcctcaaaccgccagggccaattctgacgcgtttgatggccgacctcgattccttctcgatcttccgcctttgcgcgccctctcccagtccacattctctacacggtttcgccggcaacacagacgcactttgtccgctcgcgggcccgcgtccaggtcaagcagcacgcgcagctcaagggatgcccagagaagtgggcgagctgcccggtcggcgaggtcgtcaaggccatgctcggcaagtcgtgagtcgattcctccttcccttcgcagctcgtggccctcggcgccatctcggcaagcgattcgtcagctggcctggctctctatcggcgtggccggatctcctccgctctgcagccgacagctgggccgacgtggtcgcctgagcgcaggcccttccttgtccaacgagccgccgctgaccgacgcgtgccgcccccccccgcctccgcccaacccaggcccgaaaaacgctcgtccttagcagagcacggcaaggccacgggccgtggtaagaatgccagatcagacgtacaaggaggcgagatgctttgcatggttagtcttaattcactgggctacaagaaggcccctgctctcacgagcaagtccgactcgccgcctcctgacatgaggcaaccttcttttgtctaacctacttcaaccgccacttaacagtacgagaaagcaatgtgtcgtgcttggccctttgtgtctcctatatcgtctctcgacagtcgctccccggtcaatcgtactcctcctcggagcagtggtcggttccgggcgcggcgcgaggcggaaagctgtccctccgctccgctggtttggccacctcatccggactctgaatcactgaagttggtactatagatagccaaggcacggccgcatctttctgtgtacgtcttgcttcctgcagattcaacagggtgacggcagacgggacgaaaggcgaccgatatcggtcggaggttggtagcacgctgtcctgcctacgcgcgttttgagcctgttcgtcggcttgaccccttctccggcacctcaccacgctcgccctctgacgctctctgacctcgcctggctatggttgcagcacgtgagtagccgtgctcgcatcgctcgcttctttttgctctgggctgaccttaaccgcctgtcttgtcggatgccgctctcagccggtgcgtccgcctcgtcctggccccgtttcggcctgctgcgactcgctgccgccgacgagctgtcctacaggttgctcactgacagcctgcgtctcctcttcaggcccctcgcagcccgagctgcacctgctcgtctgtacgcagatcgtcaaccagctcatcgccaatcacaaggcccagcagcaggcctacgggacctcgaccaagcccccggccgacgtcaacctgaatggcgtccggcagaagatctcaaagcagcacgggctcaagagcttgcccaggctgatggacatccttgcggctgtgcccgaggagtggaaggcgatcctcggcagcaagctgacgatcaagcccgtccggacggcgagcggtgcgtccagcgccctctggcgggtcccgtgcgcgaggctgcgcctgctgaccccggtcatcctggctttcgatgtcttccctttggtcaaccatcaggagtcagtccttactcgtagctggtctgatgtcatcgagctgcccttgaccattttgcctccctccctgcctgtccttcgcaggtcgccgtcgtcgccgtcatgtgcaagccgcaccggtgtccgcacgtcgccatgacgggcaacatctgcgtctactgccccggcgggcccgactcggactttgagtactcgacccagtcgtacacgggttacgagccgacgagcatgcgtgcgatccgggcgcgctacgacccgtacgagcagtgcaagggccgcgtcgagcagctcaagagtctcggccatagcgtcgagaaggtacgtagctgtctcgctccagaatccctcaaaccagtcgctgacatttcattccctttctcaaaggtcgagatcatgtgcgtggagaagtgctcgtcctctactgtgacgctcgcgaggctgacgttgctcccttcgctgacgcccgcagcatcatgggcggcaccttcatgtcgatgccagagtcgtaccggcactcgttcattgccggcctgcacaacgcactgtcgggcttcaccggcaccgacgtcgatgaggccgtccgcttctctgagcagagcaagaccaagtgtgtcggcattacgatcgagactcgaccagactattgcttgcggccgcatctcaggtacgcccttgttctgctcgacacgctgcaccgtcgcatcgtctgacgcgcttgctctgctccctcacccaagtcaaatgctgcggtacggctgcacgcggctggagatcggcgtccagagcgtctacgaggacgtcgcgcgcgacacgaaccggtgcgtgccgcgacctgcatacttcaccctgaagcggtactgacccgaccacgatccactcgcagcggtcacacggtcaagtcggtaaccgagtcgttccagatgtccaaggacgccggctacaagattgtcgcccacatgatgcccggtgcgtcgttgacgtcaatggggttcgtggcgccagggcgtctcctgactcctgctccaaactctcgcagatctcccgaatgttggcgtcgagcgcgacatggcgcagttcaaggagttctttgagaaccctgcctaccggaccgacggcctcaagctctacccgacgctcgtcatccgcggcaccggcctgtacgagctctggaagacgggacagtacaagaactacacgcccaacgcgctcgtcgacattgtcgcccgcatcatggccctcgtcccgccttggacgcgagtctaccgcgtccagcgcgacattccgatgccgctcgtcagctcgggcgtcgagaacggcaacctgcgcgagctcgccctcggccgtgtcaaggactttggagccgagtgcagggacgtccggtatcgcgaggtcggcgtgagtacaggatcttcccctcccctcggatgaaagccgcctcgctgacgacagctgctctcgcccttcagatccaagagatccacaacaaggtacggccctaccacctcgacctgattcggcgagactatgtcgcgaacggtcggtccctcttcctcattccgctttgcgttcgcctgactgacagaatctgcttcatcgcaggcggctgggagaccttcctgtcgtacgaggatgccgagcaggacgtcctcgttggcctcctccgcctgcgcaagtgctcagaggagggcaccttccgcaaggagctgatcaacgggcccgatggcatgggcgcgagtgtcgtccgcgaactggtgcgtccgtcgtttcggctctattttagccaccgcctctgacgacccctttgcgcctcctgccagcacgtctacggcacggcgattggcgtccacggccggaaccccaagaagttccagcaccagggtctcggccagctgctgatggaggaggccgagcggatcgcgcgcgaggagcacgacagctggaagctcgccgtcatttcgggcatcggcacgcgcgactactaccgcaagctcgggtacgagctcgacggcgtctacatgagcaagctgctcgtttagcctgcgcattcagcccaacctgtaccactgtcctactcgagctgcccttgatgcctcattcatgaccccttcacgaccctctcctgccgacccatcgccggcgcatggatgacgcgtgcactgtcgcgcgacctgctgcgcggccaggccggctcgcacgtcccgccggctcgcgatcgtcgtttcagcacctcctaaccatcaccatccagcaatgtcctcccagcagcagcagcagcccaagaagcgtgtcctcgtcgtcggcgcaggcgcggccggcatggcctgcgcctcgcagctgagccagtcagccaagtttgacgtcacgctcgtcgatgccgtcgtgcgttctgatcgtcccgcgagctcccggcagctccgtcgtgcgtccgatgagccagggcgagggctgaccacctcgctttgcctatgcttcgctcgctcaggactattgcggcggccaggctttcagtatcccgatcgacgagaagaagcacggcagttcatggatgaaccaggtgggtcggtctcaaattgagctcgtctcgattcactttcccccttcgcatgcgagctgtcgctgagccgatctctcgccctccttcacctcgatccggtcacccagggcgtccaaggcggctccaacatctaccaccacacgtttaaggtcttcaaggaccagggcgtcgaggcccagccggtcgacctccaggtcagcttcggccgcggcgaccacttctggacgaacgtcttcccaacgaaaatccacgagaagcatgcgtccgagatccggcgcttcaagtgggcgatccgcttcatgcgctggttcgaggtcctcttcgccgtcatcccgatcaaggtctcgctcaagatgttctgcttcagcgacgagttcatcaatcggatggtttatccgagtctcgccctcttcctcggcaccggccaggcgacgccaggtgcgtttctggtcaccagcgatcgatcgcgctcggaacgctgaccctctctcgcacgttacgccagatctgccgtccatcatgatggagcggctctatacatcgccgacgtacggcatgtggtacgagatcgacgacaagatgctctcgtctaacctgccgccgatggtcgtcttcccgaacgagagcgaattctatcaaaagtggaaggaggacatggagcgtcgcggagtcaccgtacgtctcctcgccaatgccgcaacaagtgcctgtcagtctgctgacttgttttctgctgcctcaggtccggctgtcgaccgaggtgacgcgcatcatcaagcgcgactcgaccggcgtcaaagtcgcgatccgccagcgtcgcgctcagaaggaccatcataaccccggcggcgagacggacccgccggtcgacaccgacatgcccgagacagtcgaggactttgacgagctcgtcctctgctgccttggcaagactgccgaccggctactcggcgctcaggcgcggtggatcgagaagcgcgtcctccgctcgaccaaatggagcgacgacgtcactgtcacgcacactgtgggctactctctgctcacgacctgcgtcctttgtcctcgctgacatttctccgcgcttgtgctcgacctcgatgcaggacgtcgactacttccgcaagcactaccagacgaccttcagcgaggagcaggccgtcggcaacctcggcggccgtgacgagtcggctcggatcaagaagggcaagacgggcttccggccgatgtactatatcaaggtgcggctctctgacggcgtttcctctgccttaatcgtcaagactaactctttctcacactttgccctccagaactacgatgccgacccgcgcaaggtcgagatgtcgttcgactgctcgtgcgtcgaccccacactagtagggctgcgaacggcgcgctgacaagcactcggtctgcggcaacagaaatttccagtaccaactcgccgagaaggagctgcccgaggagcagcacgtttaccagtctatcttcctcaacacgaagcacaagcacctttggacgaaggacgagattgaccccagcaagatcatccgcgaggactggtggttccagcttgttcgttattcgtgctgtgacctctagcgtgatgtcaacgtcgctgacgcagtccttgtcgctgatcaacagtgccacagttggacgcactacgtctgtgtcgtgtgagtcgtctatctgctctgtcgcgcacacccctgctgcttggctgaacgactcgcctcgtctcttgcttttcaggccctggatgttcctcctcaactggagcggcaagcgtcacaccaagtacgctgcggcctggaccctggtcaacgcgcacgaggtccgtcttggcgtatctgtcgctgtccgtcgacgtagcccatcttctgactcgaacctcctctttcctcactacaatacaggtcgcgatcatctcgggaatggcgacggcctatgcacttggtgcgccctacccagaggacctcgagcaggacaagtttgcgctcctctgcttccggtgcgtcgtttctcgcaagcttcgcattgcatctcggcccgccatccgttaattgacctctagtcgagctctgtctaggcttctgctgctcctccagcacggcatctggtaccgcaagggaagcaaccgcgagtctgcaggcgtcaaggcccactgagtccccttcctgctgcgggccatcacccaactcccacccgtcgccaacggctccacctctacttaatctgcccatcctctctaatgaccgtgcccatccacacgcactgttgccgaccgagggccggcgtcgtgcgcagctaggtgacaacgatcagcgagcgactggctcaaagccagtcagacgcggccggcggtttgcaagacggcgcatgagcatacaaggcgccacgagcgctcactggccacgccaaacacccttgccacccttcttgctgcgcgacggcggcccagagtcgcgctcaaagccgccgccgtgcttgcgggcctcgcgcttcttctcggcgagcgccttgctcccgcgcagcatcgtcttcttgccagacttgttcttgagcttgggcgtcggcgcaagcgggttgtccgtccggaccttgctccgctgcggcttagcctcgccctgcgggaggagcggcttggccgaccggccaccgagcgtcggcgcggccggtgcaggcggtggcgggccgtgagggtcgagcgtaaagtcctcctcgacgatcgtgaccgtcgcgtgctggtcgccctcctcgtccgaaaactcttcctcgaccggtggggccatcgtgtaggacgacggaccagccatggcgttctcgccgaacgctgggttgcggaatgagggcggtcagtcggccaggcacacctgccagacaggagcagcgcctcgtcacgcaccagggtcgatgccgagcgccttctcaatctctgcgacatgggcagctgcctgcgccttccgctctatccgcatctggaaagacgcgcacgcaagggtgagcaggggcaagcgtcagcgctgcggagcaaggtgggcagcgagcggcggcggcaacgacgacgggaccgacctccttcttctgcgccttgagctcatcctcgtcgcgcttcttggcccgctcgcgcttctcggccagcttggcctgcttgcgcttcgagaagcccgtcaggaactcggcccggtcgtcgtcgttgaagaggatcttgtcgatctgcttctcgcgtccgccgccgccattgtcctggcggcgcttgcgcttgatgtactgggcaccctcggtgaggagcttgacgttggagggccgcgacggaggcatggcgggctaagtattgctaggtaagggagagagagtgagagctcgagacgagcaaggcgaactcgaaacaagggcggccggcgagcgcaggttctcggcggggtctccgcagccgccctcgttgtcggccacaggctgatcctcgagaagctggtgtccgccaacgacaacgagctcgagatgcctcttctggcgtcaggagtgtcgtagaggtctcatgctaactatccggctgccctcgagcttgactggcccgatcctgaccgactgccaggaggagagccggcccgtcttctcgcctgtcgcgtctcgtctgtctgcgcctgaagcagatggccagcaaccctcttcggacctctcgcttctacagctcgactgcgtaaatggccagcagaatcgaggacgtcgtcgtcaaaccaaagtgggagatccgggccgagtgctcttgggcgcagcgaagccatccggacgaccaagctcaggtgcggcccttcctcggcaccgtcttgtggctgcatgtccgccctcttcgtgctgacctaccatacatcgtctttcttattgcagaatagcatcctttgggatccaacccgtgatttagcctctgacaagccgctgacctgtgtcgactctttgctcgaacagcctgacgatcgacctcccgaacgtcagcggcgcctcctcgctcgacctgcaggccgaatatctcatattcacagcgcaggccggactgtgagcgggccgggggctgtccctcgttgagtccaacgaccagtcctgctgagctgataaggacatctcgcgcaggatcggccccaacggggcgccagtagccgagtacttggtcgatatcaagttcttccggccgatcgacccagcagagaccaagatctccttcactgcaacaagtctagtcctcttcttgcgtaagaaggcgcttgacaagacgcattggccgcgcttgcgacttgccacaaacgacgttggctggctgcggcgacacgagaccaaggtgcgttccttctacgattagccgcggccgaaaagctgaatcgatctttcaaatgcagtggctcgccgaggacgagcagaagttcggggactcgctcgacgggccgaccatcaccagcatcaacacgcctggcctcggtcgctcgcctccggtgcgccgatgaccggtcgaggatcggacgctcgacgtcgctaactctgatgttcgccctggacagatgcgcagcatgtccgctggcaagcgcaaggcgaggcgcaagccatttcagtgacgactgaccgtcttgtgacgtcgaggagcggcgatgccgcgcacgccggctcagcctacggtccgccatcttgcgactcggcagccaacatattcagatgacactccttctcatttcccgtctgcacgacctcccagctagtctgccccgaaagatatgaggatcatttgagagcatggaaggccgtagaggccggcggaatgtgacattctgcgcggcgcgcaacgacgacgagagatcgtccgctgctcgtcgctcctcctccttcacccccttccttccccacccaccttccatacaacccatcatcatgtctgctactcacaacgccgagtgcctctgggcccagcgctcgtccgagaccgacgaggagaaggtgcgtccctgctccgactcgacctagagccgccgtccgactgcgtttttgcgtcatcccctcgacgagatggctgccggccgcaccttgtcgctggggcgacggccgagagctagctcgttggtgaaaggcgggcccgagtcctgattgctgaccttgctttggacgttgtcttttctgctccggcgtcacccagaacatcgtctagtacgtaccctcgagctcccgccagctctcgtcccgactcgcacgctgaccgcccttcctgccgttccgcagcctgaccgtcaatctccgtgcgtctcatggatggttctctttctctatcgcagagctggacgctgacgagccctcattctccagccaacatcattggcgagcccgagctcgacattcaggagcagtcgatcagcttcaaggcccaggccggagcgtgcgtcccttccgagctcgagttcccagacagctttccaggcctgacgaccgactctgattcgcacctcgctatgctcctccagcgccgacaagggcatccctgagcacacctaccagttctcgctcgacctgttcgccccgatcgagccggccgcgaccaagaaaaacctctcgagccggtacctccagctgatcctccagaagaaggaggccaaggaggagttctggccgcggctcacgaaggagaaggtccgcctccagtggctcaagactgatttctcgaaggtgcgtttcttcgaggtcgtgccccgtgttgctcagccggcgctgacccgctttcgcttcgacgcttcttcagtgggtcgacgaggacgagcaggacggcgtcccggtcgcggacgacagcgagttccagggaggcgccggcggccctcctggcatgggtggcatgggcggtatgggcggccctcccggcgccggcggcatggactttgccagcatgatgggcggtggaggcggcatgggcggtggtgctcccggaggcatggtgcgtgcgatcaggctccccttgtgatcgggcagcaggctgattcttcatttcgctggcgtcactacgataggatctccaagccctgatggctcagatgggaggaggagctggtggaggcgctggcggccccggaggcgccccgggcggcatggtacgtccgccctggccacctggtgtccgactgctgctgatctgcaaccctctgcgctcgcctaggactttgccaagctcatggccgacatgcaggctcagggcggcggcgagggcggccccgaggaggactcggacgacgacgaggacccggccaagacggccgacgagaaggaggtcgaagtcgacaaggtcgactagagtgcgcgaaagcggccaaaatggaaaccctacgacgacctcccggcttgatgtcatgtcattcttgctgcgctttctctccgagcttcgagctaggttgcggtctctcaatttcatattgcctctaagggttgtaaaagacgacgccgggcgcgcccggctcagcgtcctcaacggtcgtcttgacaaagccggcctcgccgtccttggcagcgccgctctcgagctgcgcgagcgcgtcgtcaaccgtcaggatttcaacggcctcgagcttgagcgacttctcgaggtaggtctggaccgtgccgagcgtctcccactcggggaacggcagcgcgaggccgagcgccttctcagcgccgagggcggccgtccgccgcttgagctcgacgacgtaaggcatcgcctttttgttcttgacaaagcccttggcgatcatcgtctcgcggatgccggcgtcgttaaaattgccctcgccatcgaggttggccttgatgacgtcgacaatgtcggtctgccatttggggaacgtcgtcgcgacgaagagccgagccttgagcggctttgtcgggtcggccggcgcggggcccttgttcttgccgcccttggccttcttgctgagcgcaatctgccggtcgcggacatccttggtgacagtccggacgtactggaggccggcaagggtcgcgaggtcggtcggctttgtctcgggcaggagcgtcgattggatcgacgtcggctgctggagcatgcctgaccagatgtgctcggcaaagtggggcatgatggggccgacgaggagcgccgttcggcggatgcagtcgaggacgagttcgcggtgcatgccgacatcggccgtcgcctcgaggtaggctcgacgcgaattgtcgagctcgtaaaagccgtacttgagggcctccttgtaccaggtcttctcgtacgcgtccttgaccttggcagaaaagtcgttgagctcctcggcaaaagcccggtcccagaacgagtcggcaggaccggtccggaacgtgtccttcttggcgagcgcctcctcgcaccagagcagctgcgtgtagatgcgctggatcgccgagttggcggtgagctcctcaaagttagcgtcctccatgccgtcaccggcgtcggcgagcgtcagccgggtcgcgtcggcgccgaacttctgtacggcatccttgagcgtgagcgagtttccggtcgacttggccatcttcttgccgttgagcatgaggtggccgttggcgcgcatcgccttaggccagtggtgctccgggaagagggcggcgtggacgtagacgcagaaggtgaggtggttggggatgaggtccttgccagacgagcggacgtccatcgggtagaagtagttgaacgaccgcttgagctcaacaaaggtcgactcgggcacgcgcgactcggcggggaaggcgcccgagccgagaacgtacgaccagatctcgtcagtcatgtcctcgggcttgatgccgagcgggccagccgaccggccgtagatgtcgccgcctgaagagacggtagccggtcagtctgtgagaggctcgagaggagccaacgcagcgacgacgaagctcaccctgcagcaggtgcgcgaccgtgtagtagctcatgtagatggtcgagtcactcagcgactcgacgaggaattgctcgtcctggggagggcgaaagtcagtgcggcacttcaacgaggaagttttcagcaactcacccaggggatgcgcgagccgagaccgtatgaacgcgagcaggcccactgcttcagccaggcgaggacaccctcgaagccgttgcgggtttctgggaagtaagtgttcatctgggcaacgaggctaggaagggggaaaggacgtcagccatcctgtcgtcgcatcgctggcgcgcacgcaaggctcaccgctcggccgtcgcgcgccactgctcctctccgtaatcgatgtaccactggtcgacgagggcgacgacgcactcgtcggcactgcgcgacatgatgagcgactcgggctcggcatacttgaaggcaaggccctggccgatcatctggtcgcggaccttgaccttggcgtcctggacagtctcgcccttgaagtcgccctgaaggagggtaccattgaagaagccctccttgtaagcaatgtccttggcctcggccaactgcttgacgtccttctgcgactggatcttcatctgctggcagagcgtcggggcaatcaggttgccgtagttgggcgtcgagatgaccggaaccgggtcgatcgcggcccactcgggctggatcttgtaaaactcggccttcttgcggaggtccatgagcgtcgcgtagtcgtcgggcgagtcggacgggaccgaggtaacgacgccggtgcccttggtcgggaggacgccgtccatcggaagaacccagacctcgggagtgagcgcaaacggcgccttgatcttggtgccgacaatgtcgcggcccttgagctcgccaaccttcttgatggcgccctcctcggcaaagatggcctgataggccatgttgcgcgcagcccggttcgtgatgacgaagagctcgttgttggccgactcgtacaggccgtacgtgatgtcgggtccaacaaagcagttggtctggccgtacatggtctcgggccggagggtggccgcgacgaggaagaccttcttgccctcggcaccggcgaagccagcgacctgcgcggctgtcgcctcgggccacgagatgacctccatcttgacgccggtgtactcctgcgggccgacagcctcgccactcgagcggtcgtggtccatgcaaggctggccgtccttgatcgagtagatcgtgttgcgcttgccaaacttgatgcggccctgctggtgcaggatgttcatctgccagcggacaaacgagtcgtagaaggggttctggtcggtcgtctatagagaggcaaacatctggtcgtcagtacaagcgagaggggtgaaaggccgcgtcaaagcaagctgccgcacgaggaaagcgcgacgccagtcgatccgggcaccgaaggcgttgcagtcctctttcgcgatcggcgggaagtactcgagccagtggagcgggtcggcgaacttcttgatctcggcccgggggacgccaatcgactccatgatctggaactggtaggtcaggccggtcgacttggcgttgagcttgcccttggttgccttcgacgggtccttgggcgcgtcagagggcgccggagcagccttggccgcaggcgcagcgacgggctcgtcggggtcaaagcgctcaaagtcctggccgaacatttccatctcgcggatgagcttgtcggcggccgactaagagcagaaaaggggcaggtgcggtgcaagacggaggtcagcatcgctgagcccaagcgcgacctgaagctgccgtcagaacgacaagacgcaccttgatgggcataccggtgacgtggaagcccatcggaaatagggcgcgcttgccgagcatgcgctggtaaccggcggcgaactcgatcttggagatcgtgaaagcatggccgaggtgcagcgagccgttcatgtaagggtagctgcggtacggaagtgagcggacaggtcagcctaacgtcaagagcagctcattgccatagcgaatgcagacgtacgggaaggtacccatccacttcgggtgctcggcctggatctcctcgggcgagagcgatgcgctgctgagctcggcctcggccggcgggttgacctcaaagaccttctcctcggcccacttcttctggatccgtttctcaatctcgatgaggtagtcgcgcttcatcgtctgagtagtgccagggttgagcaaaagccgcggtcaagggttagccgcagctgacaggcatgagctacgctcgcgcgctcaggccgtggcgggtacggtccacgagcagaacacttacgttctcgaggacgagcggtccgaccttgaccttgtcctgcatgtcgaccttagcgctgtcggccggggcagcggcagcaggcgtcgaggcgaccatcttgccggcgaacggagttgcgcttcggagggaggtgaagcggggaggagggaggaggagggcggcgcggagtcctggagctctagcggcgcggagagcgtacgtggtgaggatggcgcagcgggtgcctcgggaagatcgaggctgcaacgacggggggcttgcgtggtaagggaaagggtgtcgaggtgcgaggactgctgctgatctcgggagctcgagtcgacattgccccttcggccgactactcggcgcgcgccgcagatgattttgacgctctcgagctcgattcgtaaatccttaaatcgtacgcacgctcatctctcgtcaggcacacaaggtcgagaaggcatcgctaaggttgctcgtgcgaagaaaggtatgacttccgtccgcgattgtcgtcaaggtcgttagaagtacagaaagtgtagactacttgagccggcgcgacagatgtcagtcgagaaaagcgcgattgagcaaagaacgacaggtgactcacgagacgacgcccaaaagggggagagggagacgcgagggcctcggcctgacgaaactgatcccgagtcaaggccaccgcacctgttaaggctgcggcagcgccttcggctcgttcgagtcaggggtaaggacgggttgcggtccctgagccggcgcggccggcggctgagccatcgggttgcggaacttgaggatgatcctctgcggcttgacaggccctgatggcggcacgagtgaggccagcgacgagttcacaagaggcaagtgggcaaacgtcggctcagccggcgtggccgcaggcatctgcttgccaaaggatggaggctggaccgaacggtcatttggagcgggcatagacgccgctgattggggaggagcgctcgccggtgccgagaagccggaggccggagctgtgggctgcgtaggtagctgagacaactcgggctcctccttgatttcctttggcgtattggtccccgacggcctggcctccttgctgtcgagcacgcccgcgagactcttgtcacccgagcgagtgcgcgtcatcatgcgctcgccggtccgaaccgccgtcgtccgcgagccctcggccggagagcctgcggtcaagacagggatgaagggcgcctcgagctcggcaaagatctcggtcgttcgctgaagccaagcgtcgtcggcagagaaattcggcgcccgagttgttcttcgtgatggccgcttgagcgccttctcgagctgcgaagggcaaagagttgtgtcagcaatatgcgcgaggctcaaagcgcaggccgccatgcgaccaaccttgatgagatttggaaccgaccaccactcctctgtctgacccggactgaggttcgggggcaatgcgctgagcccgacgacggatgccatggcgccgctcgccagtgctcggtcgccgtagccgccttcgagcaccgagacgacgcggcccttggcgtgcttgacggcaaagtcgacggtgtcgcgatgaaagcgctcgtagaagccgacctgtaaggaggtaggtcaggaagacggacgagctgcagagctgcgcgtgagagacgaaccggaacgttgccgccatgccgctgcatgccggctccctcatgctcgcaggcgtcgaagccggcgctgacgaggatgagagttcggtctggagaagcgtcggtctcggtgaggaagcggaccgtccgtgcaaagaggtcggtgtagcgtgggtagcagcgcgcccaaaagtccgccggcgacgagtacggcagcaggtggatattctcgctgttgtggccagaatggtcagctgagtgggacactcagactgaggcaatgctgggagcacgcacatgtactggccgtgggcagccaaattgaggcttgcgtccttcacgcgctcaaggttgccatcctcgcaggggaaggagtactgcgcggggcaatgcgtgaccgctcgtggttagctggctacaggaggctcagacagtgagcaaatgatcgcttacgatgtcatgcaccgatccgtagaacaccttaagtccgcgcttggtctcggccggcttgccgccggcgaccaggagctcctcgcggtacgtgtcctcgttcaggcgcagcgcaatctcctgcgtgccattgccatggtgcaggtctgtcgacgagcgagcttaatgtcagtgtctaaacctagggcgactagagagagagagagagcagctgaccaatgtcgagaataacgacgcggtcgatgccatgtcggaggtaggctatcaggagcgggcgcagggaggatcagcacgatgccagagcccacggaggttaagccaacgcaccatgcgcagccccgacggcgacgttgttgacaaagcaaaagcccatcggattgtcctctccgcagtgatggcctggcggccggattgaacagaaggccgtcgctgccgagttcgagaagacattggaggtcgaggccttgctgtcggcaacgacggcgtcaacagccttaattgttgttgacagcgccccctcgacagctgcgagagaagcccggcagactgcgggggtcgaagcagccgctacggatcagctgccgacctcgactgggcggagacgcattggtcgaggacgcacggtagaggtcaagctggggcagctcggccgggatctcgctctcgccagtcgcccacttgccctcgcacgtcttgacccagctgacaaggctgtcgaggtagcggacctcccccgggtcgtcggacggcgggtgatggataaactcgacggccttggaccggatgagtccgccgactgctggagcggagaagacgaccgtcggctgagccgggctcgaggagccactgcctcctgcggccgaagcgccgagcgcgagtccttcgagggccctgacgaggtcgtccgactggtcctgctcgtgctgctcgacctcaacggcaggctggatggcctcgagccgggcaaggccggcggcgaggccgcagttgacggcgcggagtcgctcgggtctctcgacgatattgtcgagcgagaaggcggcgcccggccgacgaaagacgtgcttggcgccttcgggctgtatgaagaccttggtcggcatcaggagctgagcgctcgccgtgcaggggatgtgggagatgggcagagggcagagagcacggtcaacgacgacctgggggctgaggccggctggtcgacgcgccgagcggttgccctgccgaaccagtcggaggcagacagacccctccctcccatccaacaggcctgtcgtgacgacacccaggcgagtggtacatgaagcggtcatcgtccataaggtacaagaaagcgcgtgcctctactgcatcggtggcggcggcggcggcggtggcatgccgtacgccgggaagcctggcggcggcacgctgtaatcaaagcctgccggcggcccaggcatgcccatcggcggcggcggaggaggcggcggcataaagtgctgctgctggaactgctgctgctgctgctgctgctgctggaactgaggcggaggaggcggctggccatactgctgctgctggtactgctgctggtacgggtcgaagcctggcggcggcggaggggggaagccaggctgcatacccggcggcatgccgaagccgggagggggtgctggaggcggcattccgggcatgccgtagccacctccgccgccttgcgggaagctggacagaagagtggcgagcggaaggtcagccggtagagccacctcgtcgagccgctctgcgtagacgcacccaagagggatggcgttgccgccgttgcccatgccaggcgggcccatcatgggcggccccatcggccggccaggtccgcccgtcggcaggacattgttcttcttggcctgctgggcgagcatccgctcggcctcggtgccgtgccgctcgcccttgccgtccttcttaaatgcgtactggacggtgatggctttgttcatgaggaactggccgttcatcgcctcgatcgccgcgtcagacgactcgaagtcgttgtaagagacgaagccgtagcctttcgagtagcccgactcggggtcacgcgagatctggcgcggaggatggccgaccgaggtcgaagagggtcagcggggctccctcgctgttaagctttgtgacgtgcgactgacctttgccggctggctgatgacgccaaaggccgagaacgtctcgtacagcatgcgctcctcgactcccgggtcgagcgagccgatgaacaggttggcgccaacctcaatctgcttcttgtccgagctcgcctgcgcagacagggtgcaagccacgtcgtcaggacgattgctctaatgcatcgcacacaagggcagcagaggcgcaccttgttgacccggattggcttgccaaagagcttgatctggttcatgatccggcaggcgtactcggcgtcctcctcggtcgcaaactcgcagaagccgaagccttggtgcgcctgggagatgcggtccttcggcaggtgcacgctcactgtggcggagggacgtcgggtcagaggggggcagtcagctgccagaatcgaggaggctggcggcggcgccggtgcagctcaaggagctgcgacggtcgggaacgagaagcgtcggaagggctcacggacgggaccggcctgtcaaagaagcaaagttagctggtgtgattggagagggcgagataaacgctcagctcgagaaaactgcggcgacgtacctggagcatgagctcccacatcagggtgtcggtgcatcggtcctcgaggttgccctgggtcgcgcaaggcccgagcatggcgatcgaagcagctggcgatcagctctggcatctcgggcagaggcagcctcgcaagggatgactcacgaggtataccgtagcctcctggttgcgatccgactcgtgaggggcgcgcgacatttccgggtctgttgaggtcggagagtgagaggttgaggaggcggcgagctgcaagctgccctggcggcacaggcaagaggaaagcctccgactgtttcgaggcgcaggggtgatgaggagaggacagcctgtcgtgcaacctccacctccgctctcccacccaagatggcaccgactgctccgccggcttaccggacaaagcctctgcgcattgcctgcgtccagttcgaccccaaggtgcggagccgtcaagatgagaccacgaagcgccgcctgctgaccgccgctgccgccctttcgtccgcgcgcagctcggccaggtcgaggcgaacatccgacgggtcgaggagctcctgaaagagtccgttcagcgtccaggcaggatgaagtgagctctactgaccccccttttttaccgactggcagtctcaggccgggagccattgacctcgtggtgcttggcgagatggccttcaccggctactgcttcacttcgtccgcccacatcgcgccctatctcgagccgccccggatcggcccgacggcgttgttcggcagggccctcgctcagagagtgcaggcccatgtcatcgtcggttaccccgaacggccagaggagggctcgttaccggatgcccgcggtttcaactcggccgctgtcatttcgccatcgggcgaggttgtgcacaacgccagaaagtcgttccttttcgagacggacaaagcgtgggcagctcagggtacgtcgcgctcgctcttcgtttgcaatgtgacgaggtcgatgttccgagtctgacgctttggccgacgaaccgcgcgcgcaggcgccggcttctcgttcgtcgacctgccgcctccgctcggtcgcgtctgtgtaggcatctgtatggacgtaaacccagaggactttatatctccgtgggatagctacgagctgtcgaactatggtgccaagaacgaggtcgaccttcttgtcctctgcgccgcttggctcgccgccccgccggccgaccaggacgcgcccatcgacccggacgagggggaggacgacgacgagcacccggacgggccgtcgctcgacacgctgaactattgggcccatcgcttgacgccgctgcatgacccaccgccgccggccgatccgggcgcaccccagcgcaggccaaaggagacgctgtttgtcgcttgcaaccgcgtcggcaaggagtctggtgcgtcgtgtagcttaccagatggcctggtcgatcgctgaccgtctttccaactaccttggccctctaggctgcacgtttgtcggcacgtcgacggtgatgaagctgtgtcctccggggacgggcgagagcgctgcgacgagggtcggcggcgggagcgcgtcgatcgaggtgctcgactgtctcggcaaggcggaggaaactgttttattcgtgaccataccatgaacattagagagccgaagttcttctgaccaaagtgagcaagtggaccccttcttgattgggcgacgcatgccgccgccgtcgtctccggcagcgcgtcgacctcgacctgtggctctttactctcactccccctcaccggtcctctgccacctgactcgctcccttgcgatggcacagcagaagtgctcgccgttcctcgacctcatcggctcggccaagtgtattaagcagggtgccgaagctgtcagtccgtcaccggcctcaccctcgagctgcctcggtcgcccgcgctgctcagcccggccaggcgacttgcctctcttgctcgccagcatctcatctgacgcggttgatgcttcccgctgctcggtccgcttggcctttcggctcttcagaaagtctacaagacaacccttttcccctccccgacctttactcccagctcaacagccgtcgccaacggcgacgctgaggccagcacgtcaacggctcagccagtcccgccgccagtaacggtcctcctcaagcaccgcttccccaagcgctaccggcatccgcacctcgatgcccagctgacgcgcctacgagtgacgtccgaggcccggtcgctcgttcgcgcggcgaggggcggcgtctgcgtgcccgcgctgcgcggcgtcgacgtcgacgttggcattgtcggcatggagtggatcgagggctggagtgtgcgcgaggtcctgggcggtggcgccgagtcggacgaggctggaggatccgacgacgaagacgaggatggagaggctccttgctcggccgaggagcaggcgccggcgccggcgccggaaccctggactgagcttgacctcggtgcgtctgacatagtctttcggaagctcaaacgggcatgctgatgcccactcgtgtgctctcggctgcttcagagccgatggcttcactgatcggaacgcaactcgcgctcctgcacctggccgacgtcatccacggcgacctgacgacgtcgaacatgatgctccggccctctgcatcaggggcatacgacctggtacgccgcagccaatcctttcatggcgcttgaatctctcgctgatcgattgctctgtccgcaacccccccccccccccccccccgcaggtgatgatcgactttgggctcgcctatatgtcgaccctgtgggaggacaaggccgtcgacctttacgtcctcgagcgggcgttttcgtcgacgcaccctggctccgagggcatgtttgagacgatcctccgcgcgtacgagaagggactcggcaattcgtggaaagagattggccgcaagctggaagagggtgcgtgcttttgtcccggcccgcagcgcttctccaacgacgcgagaagcaggggcgggcacggccctgccgtcatgtcatccgtctcgctgactgctttgacctcccttccgttggcgcctggcgcagttcgcctccgagggcgcaagcggagcatgatcggatgagcttgccgcgcgagacttgaagtcgacaggcggcgcgctggtgcgagggtgacgactcgaggtgagaccgacaagaccagtcgcggccagctcaggcggctactagtaagtgaccggccgacagcgccatcttgagactgctgctggagcagcctgaatttgcagcgttgtgaatttcgaccaggcctcggtctcgtcggccctcgcgcgcagacggcccgctcagggcgacatggccgtctggatgaggctctcgaccttctggtcaaagccctcgctccggattggcatctcgagcggctgaaaggggttcttcatgacgaaatcagagtacgcgcggtagacctggttgagtagggccttgccctcgcggactgcgacggccgtcggtgctggcggtggcgcgatcgaggcgatggcgggcggcggtgccagtgaggggaaggtcggcgagacgagcaggatgaacttggtcccttgttggcaagcaggacatggtgagactgtcagcaggcgccgttgggtcacgccgggagcccgctcccgctcctcgcaaggcttgagacggacctgtcggcgtgaggaagatgatgagccggacgccgtcgctctcgatgatctcgcagccctcgcccttgccgccctcaccaccgacggggctcagctgggctgtgatagcatggacgccatggagtgtgccagcgaggacgagcgcgtcgttctgcgagatctgaggcaggccggctggaggcggacgaggacgagcgacggtcagctcgagggccgcagctcagtcgagccctggtagcgacagacgggcaaacgtccggtcatagacgagaccgccggccttgttaataatccatagcgagaagatggtcatggctgatggttgtctcgcgtcttcggaagggtgtaaggcggaaggcgaggtcgaaagggggtcagtgttgcagggagacagttggtgcactcgcgtcgcgcacgcggcctccctccgtcctcccttctgaacacaccgcgcatgagcagatttgcagacaagagcaatgagtcgttcaaaacttctagttgagatcgcatatgattgtacaacaaaagctagggctgagccggtgacgagttccgcgctgtctgccgctgggcgagatgcgcaagaggccggccgctaaccttttttgaacctgtggggtaaacagcacaggggtcagttggtgagcacagagttggttaagaggagtttggccgcacccgagcttcctagttacggcggaggggagaagccggacgtgtgtcagcaggaaggcaaaaggcggttcggcagttgcaaatcgcacggcgggcaacgcactttcgttcatagaacaggtctgtcctgctcgcgcccaggttgacaatcttggggcacccatcccgatccttctcgagccgcgtgcactctgtgcaatagtacgcgtcggatatgcctgtcgaagcggagagaagccgacggagggtaaggttgcgtcagtcgccggccacctggattgcgctcgcagagcaggtgtcgatggacgcaccctgtgagccgcagatgatgcagcggccaccatacgttccgaagttgcagtcgtcacaggtgcggacgagcgtcgccggccggacgtacctgtcgagagaaggagagctcagaaagcacgcctcgcacctcggacgacaaccggccgccgacacttggacgtcggactcacgagtcgcagatgggacactttccgtcgcacttctcgcacaggcggccgatggctggcagagcgggcaggagaagcgagcgactcgtcagcgctgtggccgcaagctcagcacgcgaggagctgctgccaggagccaggtataacgcaccgatgcccggctgacgacggcacatgatgagatctggagagccgtacgcagggatcagcatgcaggtcgagcatctcgaccgaggggctgcaggacgagacgtacccgggtgatgcttcgactgtggcggcgcgagccgggcgagagcagggtcagcagctgggctcgtcctgccaagtcttccctattaagacatttcgatagttgttcgggcaacgtaccatgacagcaggtgcttcttgacgaggacaggcgagctgggatcgatggggcggcctcgaggcaggacggacagagtgacggtcaggggcgacgaccgggagccgctcttgagcagccttcttgctgccggcgctggccggcctcttgctcgtgtccacgatctcacttctctcccttactccctcccgaccacgctcaagagaggtcccgtacccagctcaaacgtccgcgaggctcagagagcagccagaccttcgatcgctcgcaagccgagcgatcctccttcggtcgaccatggacaacctgactgcggcaggccacctggtacgtgcgcgcgacatggctcgcttcgccggccgagcccatctcgagtctctcagatgcagctcggccgtcagcatgggaaggctgctgatcgtctgtgcgtctctttggtacctgcaggaccttcctttggtcttcaaaatctcgttcgggtcggacaatcgccgcgtcacgtacccccgcggccggcactgtcacttcgacagcctgcgagggaccgtgcggctctccactccactgccccttcgccctgctgccctatagctgacatggcatcgtgccgggccttcctcctttcggcttcaggtcgagcgtctctactcgctctcggcgagcagcttctacatcgcgtacaccggtccgtgctccagccgttggagctcccgggcgcgttctgcctcggtcgctgacgcatgtcatctctcctttgcccacaactcagacgacgatggcgacgagacggccattaagtccgacctcgacctgtctgaggccgtccagtacttcggctcgggctttgacgacaacgtgtcgtcctacacgtcggccacgacctcgacatcagcctcgttcgactcgtccctcacgggcggcggctcgggcggcgagaaggtcacgctccggatccaggtcgtcgtcgagtacgacggcccggcactgagcgagacaggctcgatcgccgagagcctctctgaccgcgagaacggctggagcggtggcgacaacgacggcgcgagcgagcgcagcagccagtggaccgaggggagcgaagactgggctgagggccaggccgagcgcgaccggcgcgacggcgtcccgagcgggacgagagtcatcatcgaggacgactgggacgacgagagtatcgacctctcgcacgacccttttctcccgcctgcgcccgagcggcagctgaacggaacgtcacatcctctcgcccagagcttcggcccctcatcctcctcgtcctcctcctccggatcgcattcgcttcgtctcgcctcggtcggctcctcacccgtctccgaaggctacctcgccggctttgcggcgtcctcgccgtcgcacgatgacgctggcacgctgcatccggccgaccgcagcgccgactgggacaccgtcgctgacggcaacgacgacgccgatgtccggacctcgacgcctcacgatgggtctgacgctctcgacgacagcggaccctggggtcccgctgcctctgccgacggccggtacacggcctcatctaccatcgttcccagcctgccctcgattgaccagccgctgtcgttgcacgagtctcggtcgacttctttgcgactagccgatcggcagacgggcagcagctctcggcgcccaccgttgggcgatagttcaagtcaatcgaccgcgtcctcggctgtgtctgggctcgagcagagcgagtttggcgcacgctggctcaaggagcagggcgagatgctcaaaaagcgctctgcgctccccggcgtccgcccagcagccaccaagagcaagggcaagcagcggggcagcgcttcgagcgaggcgtcggacgacgacgacggctcgagctttgctgagggcgccctagcactcgagcgggccgagagcggcaagtggtactacaactactcggccggctcttcgcgcgactcgcttggtgtagacggcgacgagcgctactcgcactcgaacggatcgtcggcacgtccgttcgcggccgcctcttcgtcgacctcgtcttcttcgttcccagtcttgtcggccgcctcgtcaagctttgtcggagaggagcggcggcggccggccgccttctacttgcagaactcggacggcgacgaccgacaactttaccggcagacctctcagtcggctgcggtcgagggcattccgctcgaggtacttcgcatcgcggccgaggtggagactggcgtcgttgccccacccaggttcgcacccgactgctcggcctgcggcatccgtctgacgtacatgcgctacgcgtgcacaaaggtgcgtcttgctgccgagttcgagcgcagcaaagagcatgcgctgacgcctggacgactttccttattgcgagcagtgtggcgaagccgagaagcgcgacgagcacggcaagccgcgcgcacaccaccatcatcaccatcaccaccaccatcaccactcccatcggcgcccgcaccattaccatccccatcctcacggcatgtgccctccgcggcgactcgcctccgacccggtccgcgaacccgggccgagcgcccagatcctcgaggaagaggacgaggacgacggctatgcgtccgacggcaccgagctggtcggccatcgcaagcactcgcaggttggtttgtcgcccatctcgtcgaacccgtcggcatctgcctcggtgacgtcgctcggctcgacagtctcgtctgtgggctcgcacaaacctctgccgctcctccctcctgtcgaacctcaaggcggcttcgagctctgcgcttcgtgcatcgagctccacgggtacgagcactcgcgagagttcttcaagcgccggaccgagacgggcgcctgggatttctctggcggcgacaacgctggcgcagggcacgcgttccgcgagatcgtctggtcgggcatcgcacatggagggtggaaggacgtcggtcagtcgaccccctgccctcgttctctctcgtcgctcacgtcgctcaagctgactgacctccttgctctccctcactgcagagtacgacggcgacatagtgtgctccatctgcgactctgatgtctcgcgcaaccgctacaagtgtctgtcttggagcctcgcatcagccctgcattagcgacagacgctgacgactcgcgccctctcacgttctctccaggcgtctcgtgccccaagtttgacctttgctggcagtgctatcagcgtgttgaggacattcacccggtgcacgcgtttctgtcggtccccgatcgagagggagcgccagtcgccgagaccgctgcagctggccagcgtatgaccttttcgaactgctctcatttgaccgctcgctgactgaccctcgctgccaacacagtcgtccagcaccctggcgccttctgccacaagtaaggaggccgactctctgttcctctgccgtcatgactgtctgctcacgcgggcgcacctatcccattgcagctgcctgcaaaatatcatcgggccgcggtgagagctgctctcgcatagccccgacttgggttccttcctgcgctgtcgctgacctatcctttcgtctttgtcgcagctttcactgcgcgatctgcccatcttggttcgtctctccctttctgcgaaccatctcgccctctgagtttgacctctcttgcctgcgcagggatctctgcgcggcctgcgagagcctaccttcgaccagcgctctcggcggcgcccactcggtcgaccacatcatgatgaagatccccgtgccgctcggcaacgccgaggtcgagcaagtcagccgtcgagtccgcgatcagtggctgcagcaggacgcccaaacggtcgccgccgcccaggcgggaatgcggatccagacaacgggccgggcgaacgctccgtctggacccaacgctcctcgctctgcggacgccaatttgtcgccaccgcagcgctcgccggcctcgcagtcgtcgggcactttgtctccggaactctcgacatccccgtcggcgcttccgccgccgcctgtccacccgtcgcgctcggcctggagcggacctgtcggcggcgccgtcccgccacctgtcccgcctccgccaggtcgatctgggcgagaagaggcaagcgccgtgcccgagtcgaggagcaggatcggcccttggagcttcagcctctcgaccagcgggctctccttccggcgagcgtcatcgagcaacaatgctgccacgacggcggcgcctccgcggaccggccatcgctgctcgtgcgatagctgcggggcctacctcaacggcacgcgctaccagtgcgccaactgctcgtcggacccggtggcatacaacctggtgtgtcgaaaggcctgcctctggcgagagtatctgccgccctccctgaaacgcgctctgacgcaccgctcgtccctcaagtgccctacttgcgaggccaagtcatatcttgtgcacgacccaaagcacgctttcctccgcatcgaccggccggtcgactttcatatccggtctcgcgcgccgctaatcccgcttctctacagcacgcctgccggtcagacggtcgatccaagtctgccgctgatgcgtgccgacattgccgagcgccaggcggtggcccggaaccagaacgacccgactggttcgtgctctgagcttgcccgccttcaaaatggccgctgacggcggcctctgcttgccttcaaatagcccacctgcgcttcctctaccacccgtcgacggtctgcgatttctgcatgatccccatcaccggtacgaagcttttgcctgtcgcagcccttgcgaaactgcatgctgatcctccggtccttttccggccgatctcagggtgctggctccgctgcgccgtctgctcatcgtcgtttgacctctgcggcgactgtcaccgatcgatcgagcacgaccgcgaccacatcttcctcgtgctcaagtcggcggtcgacatgcaaatcttcaggtgcgccttttgcagggtcgtctgctcatggacaaatactgaccaccttctttcgtgcgacagggagtgtaccgcgctctcggccgagacgtctcggccgctcatcccgcaacgcatctacctgccctcgtagcgcaatcttcagcgctcgcgctctccaccgtcaccttgccctgcccttcgcccccgctgcgccgaggccaccatcgatggcctgttttagctatgacgcgcgacaggggggagaataggggctcgcacggagacaggggcagcttccctctcgactggcccgctgcgcgccctctcttgctccgccgccgagcttgcgagctgacccttgtcgtctgtcttttcccccttgacgcccacctccgttcggccccggcccacagcccagcagaccgatctcgctacgtcaatcgctcttcatctgctcctgtctcgctcgacgacctccaacatgctgccgtcgaggacgaagcgacatcttgcccgctctcggcgtcaacccgagcagcatctacggcgacaccgacgacatgctcgccggcgtgacctctggatggaatgaagggtgcgacgggggcgccaacatcgtcatcctcgggacctgcgagatcgagtcagtcctcgactgcgtcccccttagccttctcagcagccactctgaccccgtcttccgcacacctccagcatgaagtggttcagcggcgatctcttcaagctctggctcgctcggccggctgaccgcaagtccgacctgatctgcatcgtccacaatgcacgagactaggcgtgggcggaaacctactcggctgattgggtcaaggccagttgctccgccgggcggtgctgccgagcaggtccgtagaatgactggtcgtgctttcgttcgcaggtcggcgctcttcgcatcataccaatcagctcgcacgtatcggccgccatccgggccaaccttttgcgcatggcctctgatgccgagcgctttcacctcggctaccacctcgttcctgtccagatgcgaattcgaatcgaactgaagtgccgcctctggagcgctgatcagactcagttattcgggagcgcctaccgctctttgcgatcgaggcgctcggtctcaacagccgcagggatgccgatccgaaggacgagcagccggtcgcatctggcgagggggctggcgtctcgatttcggcacaaggacgcaaggacggccgcgctccacgagacgcagtcgtgcgagggtatctccgtccaacgtgctctcgcgtcgacgacgtttctgactgccgcctcctcctctcccttagaaacttcgagctcgcacgtcgtgactaatgcgttgtgctggcagacctggtggccgagctctctggtcggtccgagcggcctttgccttttcctcaaacagttgcgagtaatgacgtacctctctccccgctgatttgagcagccgatcccggctcctggggctaccggctcgacctagaaggcatctatgagcaaatctcgccagatgctttcctcttacatctcgtgggcggcggtggcgaggacgccgactcgatcgtgccggcttcgctcaagcgcgtcgtccttatccatcgccagctgtgcgtactcttcacgacaaatctcaacacactgctgatgcacagccagcggctgtcggtctcgcaggagctaccgcgacttttttgcctttctcggccgtgtcgacgtcggcctaccagccttcacggagggtgggagccacacccaaaaccaggcctcgagcacggtggccatggcggctcagtgtggcgtgccgctcctcgtgacgccgcgcatccgccaggcctacgactacctgacggacgactcgaccagtaagactgtcttttggccgactcaaagctgtgcccgctactgaggctcctgctcgcactgctcgttcatgcgcgcccgcagtcgtccgacctccgctcctcagcgagatcagcgcaatcaaggcgcttcgcggtggcagattcttcccgcctgctcgggcctactcgcaccggcacgaacgcgtttggacgcatctagaaggcttcccctctgctggcgaggccgctggcgaggccaatctcgcttctcaggcagagacggaggccatgatcgcacggggcaggcgacgggacgaggccggctgggagcgcttccatcgccaggtgcgggttcggaatgaggacacgatggcgcgcttcccggctgactgagagccgactgtcgtcctgcgtgtcgccgtctcaatctcatgtctaaagctcttgagagacttcgcgacatcgtcgtcagagtcatcagacgccgtccctacttctcgtccgtcgtctgcaggcgctcgagcttcaggagccacgcctggagcatggcggtccgacttgcgacaaagtcggctggtgcgagcgttggtgtgcgctcagcaacgatcaccgagtattgcgggtcgccgccgagctctcggtcgtcgaacggctcgttcaggcgaagaggcaaggggtcggtcgacgcgtgcggcgcagggtcaggttgagcgtctgcaggcgaaacggatgatctttgcaagtcagagtcgacgaagggccggaggagtccggcacaatctggaaagacgcaccagcggtgacagatggcgtgtcaaaggcaatctcgcagcccgctgcgcggtaccgtggcgtcattcggcggcggacacgggcgtggtcgagcgcaccgttcgggtcgtcggtcgggctaactcgcctgctggtcgacgcggccttcaacggagaaccggaggcggtcgagtcgtcctgtcggtcaagggtcgcccgtagcttggagcagaagagttcgaggctggcctcagacggggtaaatgtgccgagttcgttcgcagcagcgactaggacctcgacctgggctgggcgactggtggagggcgcgtcgcctgcctccatcggcagtcgaccgctgccctttacgctgttggcagctcgcacgagcggaaggcccagctcggtcgagagtttctgccactcgtgcttgccggagctgctcatctgagccggcggggagacgggcgaagcgggccgagccggcggcgtcgcagggtcggagcagtcgacgacccggggaatcgtcgtcgttgcgcgagtggcgacggcaaagtaggcgttgctgaagctcgcgtccgagtagagcgaggccgaggtgtcgtccggactagcctcgaccgagtcacaggcggccactgagcgtgaggcggggtgcgcgctgcccggcgcccggtccttgagccggagggaggtagaggtcgcgggcgaggtgtcccagtggaaggagagtggccggatatcgagtggcgatgggaaaggggcgagagcaatgaaggtcatctcgggggtggtaggcgagtccgggtctccttcggcccaaacccgcgctggatcgtcaacgataccggcctcgagcgcagcggcgtcgaggaggtcgtcaaaggtaccagagctgggcgaggatccgcccgatgaggcaccgtcgctgttggccggctcattcacgcttcgcggagcgctgagctgccggcccgaggatgaacgccagccgatgagatcgagggcaaagttgtccgagacgactgagtcaacggccggcctgatgtcgcactggtcaatcgactcgagcgacagctcgtactggtagaggatcgaatcggggtagccgttgaaggatacatcggccgccgactttagaggcgaggccacagacgtgagcggccgagaggtgcgcgacgcctgcgttgcggtcggacccatcgacgcaggcttgaaggggctctcgcagcggctgagagcggcattgcccagcacaggaggggctggccgggtggagatgcggcgtgaaaccgaagctcccgccatgaaggccggcttggcgtgaccaagccggtaggcgaggatgtcctcgccggcgagctgcgaagagtgtcgggcggtgtacgccttggagagcgcgtcgcacgagaccgaccgacgcacggccttggtgaatgacagaggcggcgcggtgacaaggatcgaagtcggccgtcccgagcgaaaggcggaagcgccattgcgcgctagcgaacgcacggaagggatcgggacagcctgatcagcagaggcacagccaatggaagggtgctgaggaagaggactgacgtccgttgatttggccggcgcctccctcggtcgcgtcgaggcggagcatctcgatttggacgtcctgatctggccgcctctgggtcggcaggccggtcaatgacgcccggcgagctttatctgcccgatagcgtcgccacatgcgctcctcctcgtccgtgcagaaggggcttaccgagctgaggagctcgagctcggccgtctggcggcggtcgcccgcaggcgggggcgagggcgagggcagcacgcgttgccggaagatctcgacgcgctcttcctcttcctcgacgaccgagtcgctgtccgagtcgtcgaacgaaagctgcgtcagaggcggccggcgggccgaccggagctcttgttttgacgcgatccggcgggcgagcttgcggacaaagccgtcgccactcgtcttgccggctgagctgaggctgtcgtggtggtgatgatcgccgccagcgacacgcgaggcggcaaaggagacggtggaaaacgatttgagggcgtagaaggtgcttcggggggcagcgtcggccgggacgagtggcggcggcggggcggccgttgcggagctcgatgcggccgtacggcggcggcggcggaaggtgagctttgggaagcgcatgagagctggtgtgcggtgggtgagagcggatgagggaagagggagaaggggtcggtggtgtcgcgcagaaggagtctggagaggcgagagaggatggtggtaggaagacaatgactaaacatagcaggcagatgcgagagctcggctggtccgatcagaggccggcaagccgagagggcgacaagagcttggctcctgttgatcgaggcttgagagacgcgtcgacgtgtcgctgacagcaggcacgcctggccggtgaggggtgcctcgcggctaaagcggccagaatcggagttcgtcagtcagctcagccggtgaggatgaggtctatgagtgcatccaagaagagcggtggggtataagggatttcccaaaagggtatagctgaaggatggtagaggagggacgaggttggcggcgaggcgaggcgaggcgaaggcgaaagaggtgccgcgcagcaggccaccgctcgtcggcacgcaacctcagtatcggcactcgccctttgcgcgcgggaagccgacgacgtccttgaggctgcctaggccggtgatgtggccgaggaagcgctcaaagccgaggccgtagccgccgtgagggacgctaccaaagcgccgggtgtcgaggtaccactcgaggccggccgtctgcattccgcgttgcctgcgaaaagcggattgaaaacgcgtgtcagtctcgagtagcataaagcgctgaaagcagcagttgagagaggaacggacgccatgacgtccagcagcgacccgagccggtgctccctaagcgagccgccggcgagctcgcccatctctggaacgaggaggtcgaagcaggcgaccgtctcgccgtcagcgttaggcagcatatagaacgacttttccgcctttggatagtcggtcacaaagacgggtccgtcgaagtgctgggcgaggtacttctcgtgctccgtttggagcgcagcgccgagcctcggccggtgctggaagcgaggcgccgtagcggccgagaggaggtcgatggcttccttgtaggcgatccgcgtccacgggacgtcctttgcaagcgtctcgacgcgccgccgcggctcggcgccgctctgcgcaaagacctcccagccaccttgacccgcgtcctcgtcggaaagcagcccccgagcgacggccttgaggctaccctcgacgacatcaattatatcgccgaggttctcggtgaaggcggcctcggcctcgagcatccagaactcggccagatggcgtgaggagtgggacggctcggcgcggaagcacggcgagagcgtccaaacgcgcggatgggccggcagatagagctcgagatggagctgcgacgacacggtgagattggcgccagggggagctacgtcggtgcgttcggcctgtcagcattgtggtccgtatcggcggcgaggtcgacatactcacggaagaacggctccgctgttcctgacggcgcaacggctggctcgacattgaacatctcgccagcgccctcgcagtcgctgctcgtcaagattggcggcgtgatcgagacgaacgcttgctcctgcaagaagcaacggtcggatcagtcgctggctcgccgaagagcgtctgtaccggccgcacctcgaagtagcggcggaagagcctggcgacctggtcacgcgttttgacgacggctcggcccttctctgtccgcatgcgcagatgcgcccgctcgcgcagctggtccaggccgacacccttcttgtcaggttcgatcgggtacgtctgacggggcagcaccggatgcaggtcagccaggattcgcacagctcgccgggcacggacgggctctcacctcggctggacaggtcccgaggaccgtcagcgacgacgccttgagctcgtgactctgagagcggccaggtgagggcacgagcttgcccgagacgacgaccgacgtgccccgcgtgagctcctcgacgatgctgcgggccgagagggcaggtgtggaggcggtgagctcgggcgtcgctggcagctgctctggacatcctgaccgcaccttctgaggccgcccgactccttgccgccgtcgacaaaaatctggagcggctcgcgagagctgccgtccgagagcttgacgaacgagaagtgcttcttgggctggacgagagcaacccagccccggacggtgatctcggcctcgggcgacggtggcgacctcagcgtctgggcgatggtcggcggcagcgcgcgaaggactcgcgtcggaagcatgagcggcgagacgagcaggcctatcacgtcgttcggcaagcagatgacggccaagggtaggaggtcggttgaaggttgctctctcgtgccttcgcgccgcaggcaacaagaggtcgagctccgcagcagcacctcgacagccaccgctactgaccccgcatcgtcgctctccaggacgagctctcggctgactgggccctgtagatgggagtagcagccggcagccggtagctcggcgatgctttcatgggaggcctgggagggtccatcacaagagctcactgggccgagctcaatctcgcagcagggcggcagttcagctcctctccgtctgacggccgccgtccctcgtcttctcggtcgcgagcaatctcggttcgcacgcagagatgttggagagctcggatcaagcctaggtcggcatgtgaagggaggcgcactagggaatgctcggggggctctgcagggcgtaagagacgcccgacgcgccgcgaggcgtcgtttgccgcaccaatcgcgcaacgcagcgcactcgacgcggccgagcggtcggagcgcccctcccggtcctcgacgccttcgcccagctcggcccagccaaagtcgacgcgagccgcgacggcagcagaccagtactgccgcccgtctcgactgtcttgcgctgacaagagggctgacgggcagtctctggcgagaacaaggccatgcatagccgggcgttgcgagaggcctagagcagcatcagcgctcactcccttcacgctcaaccggggaccctcgagagtcgggatggcctcgatcctcgggcgaggcctggttcgatcacgttggatctggtttgggaaggttcggcgttcacgccgagtcgcacatgcgttgggcaccagtgatacgggcggccggccgtctttcgccgatcgaggtcacccgtagacggagcgacggagactctcgtccgctttgccgcttcgtttcgtgccggccatgggccggaccccgggccgctctgactggcctggtcgggtcaccccttcttgcccttctttctctccgagcgtcctcttctcccctccaaccacaagcttgccccgctcgatcttgcacaagatcgtccacctgttcaactcgctctcaacgatcaacgtcgacccgcatcaaacctccagctcgactcgtctcggcgtttcctcaacttgccccttacgtcttagcccggcctcagcccgctcgctcccggtgcttccggtgctcgaccacctctttcaaccagcaacctatccagatcttccacgacaaggccgatcaggttcgtccagcctgctcgcttctgacagctgttgcggctgccgatctggcgagatcgcttttgggacctcgagagctgacctcggcgctacctcggcacgtgcttcagaatgaccctcgtcgcatcgccttcctcgagcaacagcctcgcttcgagcagcagcctgcctgacgccccttcgccggtcgctgccgtctcggtccgccggaccctcacgttcccctcacgacggccgcaaaaggtctcgccgacgtaccgcgcactcgagccctacctcgagtcggacgacgaggactcggacgacgaggtcatcttcttctcgaccgcctcgcgccgcaactcggccaactcgttggccaagccggtccagcccctcccgacggtcgctgcgcccgtcgcacctgccgccgccggttgcatcaccctcaaggccgccccgcctgcgcgcaagcccaggccggcgctgcggaaaccgccgacgctcaagcgggcgctaacgagcccgactgggtccgacattgaccttcaacgaccgcgtcttcagcagacggcctcggcggccgaggggtcgcgcatggccgcgctcgtctcgggcccgacgtgcaagtcgtcgcgcaacccgagcgcgctctcgcgaacgcactcgcaggtccgcatgtgcgagcttgcatcgaccgccggacccaagtcgcccgacctgctccgggcactcgccacctccgactggacgcctcggccgacgctctcgtcaaacacgtcacccgcagttgaggagcctccgacgacggtatcgacgacgacgcgcgaaggttggttcgactgggccggatacacgatcggcgacgaggacgaggactctgtctggagcctgctctcgttcggcactcggtcgtagagcctcctggctggctctcctcttcgcatccgctgtcctctcgcgcatgaccgcggcaccccttcactgtcccaccacccatccacttctcacacactgtaccccctgcctttgtatcgctattcatgcctaccgaccatgagcctaccactcgaccttcccaatgcgagcgacagttgtggccggtcgaagagttgatgaccgagacgtctctcggccgccggcaacagagttgtctctgcggccgccccgcgcgccggccgaggagggcgcggtcagcccgaggcctccgcctgcttcaccaacgccttcaccctcgacacaccactcggacagctcgctccagatggccctcttcaagcgcaagaacaaaaaggatgctgccgcgagcggcgaggaggtaaccgacctcggcaaggcgaagacacggcggccagccagtgcgtctcctcttcgctgctccgttgcgtcgccgacctcttggtcagcccgcgccgtcagcgcatcgaacgcaagtggtcgcctggagcgaacgctcgagcaggatgatcgtctgttgaggctatctgcgtcttcgcaggtagcagtaggttggagaactcgctgggagggagtgtccgggcaggagacgggaggatgatcccgaggagtcgtcgcaggggcttggacccgaccgcaagccgcctaagagaccaagcctgactgcctaggtcaatcttaccgcgctaatgacgtccggcaggaatcttgacccaccgctgcccttggctgttgatcatgcgcgttggaccagctagctgacgcctgagcttgccctcggttcctcaagacacggcgttcaagcagcagcggctcaaggcctggcagccgatcctgacgccccggacggtcctgccgacgctcttcctcattggcatcctctttgcgccgataggcggcctgctcatctggggatcgaacctggtgcgtcgccagctcgagaggcagatgcgcgcgcaggctaaccgagccctcccttcccgcctcgcttgctcgctcgcctaaccaggtgacagaattcacgctcgactacaccgagtgcgacacgcagttggggacgctctcgacgatgccgtcatccaagtacaactgtgagaatgcgcgcagagcagctcggcccgattgatttagggcactgactgcagccgcctttccccctcggcccctccgacctggtccgtcatcgcagacaagctgtcgtccggccactctgactcgtccctggcagcgccccagtggtcgttcgctagcaacacaaacggcaacgttggccagcgctcggtgtgcacgatcgagtacacggtcccttacgacctatgtgcggccgagcgagctcttggttctgcagcttgcactttcacacactgacggtcggccttttcccatctccagcgccatcggtcttcctctactacaagctcaccaactagtgcgtcgcgcaacctctgtgcatctcgcggctgtctcctgatcgtgccgcccccatccgcagctaccagaaccaccggcgctatgtccagtcggttgaccagggccagctgcacggcgatgcgccctcggcgtacgtcctgtgtagctcaatgcatcgcgctgcacaacgggcggctgatgagcttacttttgcccttatgcaggcggagcctcgacggcggcgactgcaagccggtgacgagcatcggcggcaagccggtctacccgtgcggcctgatcgccaacagcgtcttcaacgacacgttttcgcagccgacgcttcttgccgactcgtccgtctacaactttaccgaccgcggcatcacctggcagaacgagtacaagaagtatgagccggccggctacaactcgccctcggacgtctcgccacctccgaactgggcgctccgttacccgaacggctacaccgagttccccaacctccgcgaggacgagcatttccaggtctggatgcgcaccgccggcctgccgaccttccgtaagctgttcttccgcaacgacgacgaggtgatgcgcgccggccggtaccgcattgaggcttacatgagtaagtgctagcagaggcggtagcaacacgaagccgaggctcaatatgccgttctctccctctgcagactatccggtcaaaagcttcagcggcaccaagtcaatcgtcatctcgaccgtctcgtgggtcggcggcaagaaccctttcctcggctgggcctacgtcggcgcggctgcgctctttgtcctcctcggcctggctggaaccgttcggcatctcatcaagcccaggtgcgtctcagctcttgtcgggtcaacgaggttccgccacccgcccgaggctgaccgcttgatttctttccgtaggcggctcggagacatgtcgcttctcagctggaaccagggcaagtgaggcgccgtccgactgccggtcttcatcgcccggccatccttctcctctgcgcgcccgcatcggacgtcgctcgcctccctttcatcgcctcgacccgatctctcgcccgctcgcgtctcgccgaccgtctccgcttccgcttggggcgagaagcctcgctccctttctcctttccgaccgactcttataccatgggcatgccttcgttaagaatcagcaaggctcaaggccgtcagactttcgagaggacgagccaacgagacgcgtggcccgactgcgccgtccaatgcatgttgacgcacgagctcgcaggacgtctcccgaccgccaaccgcatcacccccgtcggccgtatcttcctctcacttgtccgagccagtcgcccagtcgagttcgacagccgcatgtccggtgccagatcacgaccgctccggcggaccggatcgcacatgtcggcggcgtcctcgtcgtcgtcgacctcgtccgctcagccgacagggcttgaggcctgcactatggccgagctctcggagcgtctcggcctgcactgcgccaagtacgtctctctgaggtgccctccacaggccaattaggatgccacaccgtcgggccggactcgacgctgatggcttgcccgtcctccagcttctacgccaacccgctggcctacacggacgcccagctcgccgcctttgaggctccgatcaagcagctggctgacctccgacgcaaggatcccaagacgcgcatcttcatccaggccgcccgctggaaccgctggaccgactcgcagggcgtcgtccaccggtttgctgcaggaggacccggggcgccggggacgacgccggccgagtcgcaggacatgaacctcgatctgcctaggtaagcccgtgctcagctccccccacccctttcattggacatgagcaagactgacaccacatctgacggcaggaacgaggtcgagtaccgacagctgctcaaggcgaagcgtctggcgcaagtcgcaccgccgtcggccgtcgtcgtcccgacttacccggtgcgagcgccgctgccaacctaccccgacagctcgctcacgtcgctcgcgacctcgcagctgctgccgacgtcgtccaagatgcgtggccgctcgccgcctgccgagacatcgcgctcttccgcctcgtcgtcggaagcatcgcgcacgtcggcgcggacggcgctcaagcgccgcaggtcgctctcgcccgtcgcagccatggggacgatcgttcccgagtggcaggagctccctgacgtcccggttgccgccgaagcttgcaagccgccatcggccggctcttcgggcgcgtcctcgacgcagtccaacctgaccttcccggtcgtcaaggcacagccgatggacaagccgccgctgccggctgtcggcaagctggctgcacaggacggcaagcgcaagtcgcgccaaagcgtgactccgcttgccgtcgacagtcgcaagggcaagggccgggcagcgagctcgacggcccgatcggccacaccggcgccagcgcctgctgcgcttgaggaggagctgccgtgggacgaggacgactcggtcgagatcgccgccgagcaagggccgacagctcgtcagaagatgagggtcaacccgcgagggtgggacggaatcgaagacatcagcgcctgtgcagaggtgcgtctcgtcgggtgtctgcagtttcgcgcaccacaaggcctgagctgacgacctcgcctctcgtctcgccttcagtaccttcctctctcctttccctcggacctcgccacatcgacacccctggctaacaagagacgaccgccgccgatactccggcccgtcacggcctacgccccggcaccctcggctgccatcgacgaccggccagagagggccgccagcctcggcggtcgggaagccgcctctcgcaagccctctgtccggccgagtcgagcagcatcggcccgccaacctgtgccgagcaagtatgcctcgctggcgacgaactgccaactgccgatgatggacacgacggcaccaggcacgccgacgtccgagtcgccatcgtcgccgtcgattccgacgccaccgaagcgcgagcggcggcagcacctcctctcaaggtcatcaatgcttggcgcgacgtcgtccgactcgcagctcggagtggcgagcggcggccagacgagcagcctggcaaagctcagcgccgatgagagcctgcctttctcgctcggcttcagccaggtcgaccgagcggtcgacgacgtgcgggcgttccttgacgcagatgctgagggcatcgccgacgactgggagtgagggcgggcgacggtcgattcatgctgatcaagagattagggcgggcggatgaaagtgcaggtgctctcgcggtgcttccagactgttcgaccgacgacgccgacgcgctgagctcgcgcgcttgcctctctcgctcgtccttgtcaataagccctggtcaagagggcaggcagcacgcacgacgtccaccctagcatccattgcagtagcctagtccgacgcgtccgcccatcgtgccaccagccaacgcactcccaccgtccttcgccagccaccgcagccgcagcaacgaccgccgccgccgtcgccgccgccgacaacggaccagcagcatgccctttggcgccaagcggtcgttctcggaatcgctttcgccgccgtcccagtcgtcgtcgtcggatgacgaggtgaccgatccgccactcaagcgacgcttcctctcgtccccgcaggcgcaggagccggcctcgcccatcatcgcagacggcggccaaccgatctacactccgtactatacgccgcgctcgtccggagtcggcctcaagcgggcggccgacgacctcgatattgacgacgatgacggctcgtcgaccgagggcgagcgcgacgactcgtcgccgtcgacctacctcgacggccacggcgcaacgctttaccatcggcctccgccggtcaagcgcttgcggcgcggcctggcctcgcacctcaagcggatgggccttaacccggccgacctcgggccgtcggtcgaggagcagccgccgcaagcgttcgctccgccctgggcgtcggctttccctcagcagcagccttaccagccgccggaggtcgagccgagcagcgtcgtcgagccgggcgaggttggcccggccgtttggctcggtcactcgcgcagcggcatcggcgacgaggtccgcttcgaggagctcagtgactcggacgggagcgatctcgaggacgagaaggccaaagcttggcggctggaagtttggaagggcgctcagggaggagacggtacgtcccctgccggcacctgtcgtcgttagcgctgcgcggtcgagcagcagcactgaccttcttgccaccatcaacctcacagcatcgcactcacgaggtcgcgaacgtggagagatgcgcctgccgagctacatgagctcctcggccccttgggcgtacaatctcgcgccgccagaggacgtctggacgaaccgcgagcgcgggctagtgtgagtgccttccaacattattgacctggtgccagctatcttggtactgactcgaagctgccctcttccgtcctctgctgcacagcctgtacaacccagcttcaaatgcgacagcaacgcccacgacgcagcagccgacgggctcgagcacgccttcgtccgagatggagctcgacacgccgacgaccgagcgcccgccaggcttgggcgagctcaacgccggcggctggttctcggacgcttcgcgctttgaggaggtccaggacgaggccgccggggctgccgccgccgctgaaacggagggagggatggacgtcgactgagcgccgacgaggacgcgtgcaaacatcacacactctgacgacgcctaacgtcttttcccccctctgtaacgacacctcacgacgactcccacatgactgtatcccatactgctttgacctgacgaagtgacggcgacgcagctggttcacaagttgattggggcagagacagagaagggaccagatgccacaggtggggagcaggtcatggcgaggatgcgagttgagctgttgtacggcggggacgactgtgtgggagggtgagttcgcgatgttgagcaagtgggacgacagggtggcgcaagcagggttgccggccgaatgacctccttcggtcggagaggcgcgcaatggccgaacgcggcgccggcaaagagcgagtgagtttcgggtggacgtaagagggaagcagggagagagagcgaggatggaaaaggaagcgagagagaggtcaggcgagcccgtttcatgccgccgtgaagtaggggtgctgcagggcccgcttggctgcaaagagggaaggaacaagctgtcagttgactagaagcgttcaagaggatcgcgaggcaatgacgacgaaccagagatgcggtgggcggggtcgtagacgagcgtttgctgaagaaccaaaagcgaaagcgctcgtcagaagggctctggcatcgttccggcagcgtagatagaatgactcacccggaggagatccaggccgtgctcgtcgaggcccgtgacgaccttgtgcagcggctgcgcgctccactgagggaagctcggcttgtagtctggcagcgacttgactccaggccagatgtcatcattgggcgtgccgagcaggctgttttgcggagaaggcggagtgggcggggtcagtccctggcaagagcctaggaggggaagcgcgtcaaggacgcaccggaagatgcggaagatttcgtcaatctccgagtcgccggggaagagcggctggcgcatcaccatctcggcaaagatgcagccgaccgaccacatgtcgagcgcggtcgagtaatgccgcgagccgagtaggacttcgggcgctcggtaccagagcgtgacgacctgagggcggcagcagcaggcttgtcagcctcccggaaagtctagcaaatatcgagaggtcgcacctcgtgcgtgtatgtccggagcgggatgccaaacgcccgggcgaggccaaagtcggcgagcttgaggttgccgtccttgttgatcagcaggttctgaggcttcaggtcgcgatgcaggatccggtgcgcgtggcagtagtagagacccttgacgagctgcagcgtgaacctctgcgaggtagaggggcaagcgggaggtagggatcagcgggacgggtcggatgcgacggagccggcgaagggcgattgcgagctcgggggcagctcgccggcgaagggcagcgcgtaccttgacgagcgccggcccgaggccgtcctctgagccgatcgtgtccatgtacttcttgaggtccatgtcgaggaactcaaagacgagatagagcttggcctctgaatggacgatgtcgagcaggctgagcggccggaggggcgaggagcgctcagaagcaggtcagcctacgacagctcgatccgaggctcctctccgctcgccgcccgggcctggcaccactcatcaggcgacagatctccagcgctctgctctgcctgacatgagaggagagcccaacgcacccgacaatgttgtcgtccttgagctccttgagcaggctgatctcgcggatcgcagtcgacggcacgccctcgtcctcggcctcgagccggatctttttgagcgcaacaatttcaccagtgttgatgtccttggccttgtagacgacaccgtacgtgcctgcagcagcggaaggaggacaacgggtccgtcagggtcagctcgaccggtcgggctgggaacggtcgacggcctcaagcagccgccgtggccggctgttcgcgtgagtcaactgaagcacgcaccctcgccgatcttctcaagcttggtgtagttgtcgagactcatggggcgtgtggcgatggagaatctagggagggagacggttgaggcaaggagaaaggctcgggctgaagccccaaaagccgacgcgtcgagcggccttgcttttgaacgacgcgcagccgaccgtccgtagatgactttcgccccgccgcactcgttgaaccgaagtgaagaggggcggcacgaggggtctggcgtagagctgacgacgagaaggtgagtgccaggttcatgatgctgaaggaaagcagcgcaggtcgaacgctcgacccaacatttgcgatcgttgccagcgttcgaccaactgtctcgcaacccgacccacacacgcccgtccacgaggacaagaatgagcataagatccctgaaagcgacgttcggaccgtgcgcgcttcctcacgcgcgagcgcctcactcgttttagttgcgcggaggcgagccagccgcagacgcggccgcctcgccgtcggtcgtcgccggctcgacgtcggtgtcgccgatgcgcttctgcatgaagtcggcctcgtcgagcgcggcgcagatgatgacgcgtcctccaaactgccggccggcgatcgcctgaacgccagctcgggcgccctcgaccgtccggaagaggacaaagacgcggccgacgccggcgtcctcgtccgacttctggccctcggccgcgctcgcctcggcctgggcgagctggccggcgaccttgcgaaccttcttggccggccgggggatccggagctcctcgacctcgccatactttgagcactcctccttgatgtcgagcagaatgtcttcgtagtcgtcgtcgatcgcgagctcctcgggcgtcaccatgttgagcatgacgatcgctcgcgaggtgattggcccagactgctgggcgaaagccgggacgggacccatgccgcccgccccaccgggaccaaccgcgttggcgcccgagccaggccgcatgccaccggcgttgccgccggcgctgctcgaggcgagctggacgacgagcaaccggtcgccgagctccatgccgtgcaggccctggatcgcaacctgcgtaatctccgggtcgacgtactcgcagaacgcaaagccctggcggcagccccgggacgtcagcagacggagacgtgaggcgaaatctccgaggaggagagcgcaccttggaccggtccgggtccccgggctccttgacgaggttaaacgccttgagctcgccaaagctcttgaggagctccatcacctggtcgtcgttgaggtagctcggcaggccgccgataaacaccttgttgggcgagtcgggcacctgcgacgagatgtggccggggatatagggcgcaccgcccttgtcgttctcgtccgggacatagtcctttggccgccggatcttgaggatcgtattgtggaacgggcagttgtcaaagaggagggcctgggttgcctcggtcggcgagcgaaactgccgggcggaagggcgagagagcgttcaggcggtgctctcacaagtcgagacgtagctcgcggacgagaacgcacctccacaaacgcgtagctcttctcgtggctgatctggacgtcgacgcaggcgtcggtccctgtctcgtccgtcgttgtcccgatcgaggccagccgctcattgaagagggcgcgcatgttgtcggccgtgcagtcgtacgtgacgccgccgacgtacagccgccggcgctggcggacgacattgtttgagaggccaccggcgccgccgccgttgccggtgcccatcgcgccgacggacggcatgcccggcccgccgccgttgatgcgcgggataaagcccgggcccatgccggggacaggatggagcggcgcaggaaggccgtccggcccgaggacgtactgcgggccgtactgcctgttggggcctggggcgtggaagaggttgcggcccttggcctcggtcgcagtcatgccctcgcagccaggcggagcgacgtcccacaaggtcttctcgcgcttccactgtgagagcgggactgcgccctcgggcgtcggactccgccgccgaggggcgtccgagtcgtacgccggccgctcgtcgcgccggccgcggttgtcgtacgcccggcggtcgtcgtgcctgtgcgacggcgcagagagacgggtcaggcttcggatcgtgaatcggactgacacgcggtgctgctccaatcagcaaagcaacaagtacgaaccggtcccggccgccatcgtatccaccccggccaccactgtagcggtcgtcgtcgcgccggccgccgccgccgccgcggtagtcatcgcggtgccgaggaggctcgtcgcggtagccgccgcgccggtcgtcgtaatcacgccgaggaggctcgtcatgttcgcgacggaatggccggcggtcatacctggaagatagcgggcaggcaggcaaggaaggggaggcaaacgcgtgagcaggaggcgtcgacggagagcgctggagacgggcaggcgccgacacactcgtcccgatgagaaggaggcgggccacggcggtcgttgcggtcatcgctgcggtagctgccagctcggcggtctgtggatgatcgagaagcaagggaggtcagtctgggagctcaaggagcagtcgatgagctagctggctcgccgccggccagagatgcgcgtcgcgcgcctggccgggtcgctttagctctgcctctcgtcgatggagcagagtcagaagcttttgtaagaaagaggctgaccgtcgtagtgatccatgacgggcgaagggagcaagggtgagaggttatgggtagcaggcgaggaggagtcgaggacggcgagcggagaaggcgacggcgcgcgcgcgcggcaggatctcctgctttgggcttggcattcccgatctgggctcggaagattccaggcccgcgcgcagacgctcgacgtccttgccttgcctgtcggtcgacagcatctctccctcaccgcatcccaagagagccagggctgactctcgcatccggtgctggatcatcaggatgagatctgccttcgaacgtgactggcgtcggatctgctcctgcaggcccctcactattcagcccggcgctcgtcgcgtctcctgtctgcagcttcggcccccttgctccgcccgccggtcggacctctgccacgcgcttcacgtccgtcgccaagcagagtgtcgctcatggatgtggaggcggcacaagctgccgatggttgccgcgggccgaaagcgggcgccctctcttccgccttcagctttcatcacatgcccgcggcctgcgctggtcactcacctgccgcgctcgtccctgcgagctctctggcagccactctccctccgcacgctcacctcgacctcctcaattctccttgacgtctcctcctgcctgctttgcacctagacgaccgaccacagtttgcacgcttcgatctccgctctcctccctccagcgctgcaactccgctgtctccgggctatccctccgaccagcctcctcggcgcaccctcaagatcgacctctctcgcactctacctccctatcagttgctcctcggagtccttcgcgaataccgacgcagcggacgaccctccggtggccatgcctcggcgttacgtctgccggtgcttcagctcgtgctccggcgccgaccctgctcggacgaccttccagcgtccgtcgactccactctgcctgcactacgatcagccgtcctctcgcacacgtgtcgctgaccgtcgagcgtgtctctccttcttgcgctgtaggccggacgatagtcaagcacctcgagcacgaccgccaacgcctggccgacctcgtcaaaagcagctcagccgtcccaccggcgctgacgcacgcgacgagcgtctgggcgccaaaagcgtttgaggaggtcgcggccgtcgtcagtgcgcgctccgctcttccctctcttctggacgcaggtctaacattgcacttgctcctcggcagacttcccgtgtcgcccgcgatcagagcactctgccggcgacggacgacgagtcgtcgacggccgactcgctgcccgacaccgatacccgctgcaacggcattccagacgcccgcgcccgcctgctgtcggctgccgttatcaacatttctacgccgagtgcgagccgcaagcggccggcagaggcagccgaccggagcggagagggcgcgttgggaggctcgaagcgggtcaagccgctgactggtgcgtccgatccgggcccctcctctctcctgtcccgctcgagagcgatcaagagctgacctgcgccctgccgatcgattacctgcgacccgtcagccacttcacagccgccgctgccgctgccccgccccctggcacggccgttcgtccacggccgtcagcccgttcatgactcccgccagccgccgaccggctctcactggccggcgtacgcctctctcgaggccactcgcccggccgagcgcggctacagctcgcttcggacgagagcacgtccggcgacgccgtttggtgcgagctcattctctcttgccgagtaaatgctgagagacgagaaggagctgatcgccctctttcaactctccaggtcacgcggcgactgcgatccagactcggcgttacgcgcggtcgccggcctttccacccggcagcagcctagaatacctcgcgcgggcgtccgcttcgcacatgcaggccctcgtctatacgcagccctaccccgcctctgatcaggtggactgggctccgaccggcgctcggctcggaccgtacgacccggtctttggcgacgaggcgcctgatgacgacggctatgaccaggacgacgagtcgctaatcgtcgactacggcttcgcctttgcgcctcctccgcttccgctgctgccgccgtacgcatcggcctcttcctccttcgacgcagggacctactcgaccagctcgccgccctcgccaccctcgctcgctgggccgcccagacccagctctcgctcgtacaactacgtcccgctccttccgctcgcttgccctccggctcactcctaccagcccgattaccagccttgctggcctgacgagtgcgacgaaaagggcaacttcgacgcctgtcaagaagcacggacggcggcgcgggagagcagtccggacgacggcggccacctgtcgatgatcagcaccgaggcgatcgcccgcctgacgcacgacgacctcctccggaacgcgacgtaccgcgaccttttcttcgaccacctcgcgctggtcagccgctcggcggtggacgaaaaggttggcaaagccgaggtcgagaccaaggacgtcgtttcgcctgtcaaagacgagcctactgccgccctcaaggagtcgtcctcgctccccgacctcggcacggccgagactatggccgacgacgacctcctgatgtttgtgctcgagccgccggcaccagatggtgccggcgtcgacgcctacaaacacgatctcgatcagccgctgccaccgccctccctcctggccgctctgccctcggacccaccctttgtcgccgatggaggtccgacggtgcacgtctcgccgtacgagcggtcgcccgctgcgagctttctcgagcggctctgggccggcatgtgatgcggctggtcgcccttcgccgcccctcaaaaagcggaggcctgcacgccctcctgcttctctccgttccgtcgcatccttccctgttagttgtcgcccgtatgcacctcccttcccatccgctcatccgtcgttcctcactcgctcgcctccgcactgtcatcgccttatgcaccgcctcctctcccgtcccgtctgtatcgcccgacccgctcctccccgtcttgtcgagctctctctcgtcgcgcgactaggcctgctcctaccggccgtcctcaccgctcgtgtcacacttccacccgccctcgatcagcctcggtccccgtacctcgtcgctcgagctccgttcctatgcccttccactgcagcatggccaccgttacacaggccgaggccacacgagtcagggaggtcatcgagatccggggtcgggaggcatgcgtcagagggtatagcgagatgggtcgaggatggcaggggcagggcggtcggaaagggtcgctgaagggggagaggatgacgcctagttgcggcgaacctgcgagcctgagcgctggtaggcgacgagctggtcgatctccgcctctgtcaatttaatcgcgctgtgtgccgcctcgaggtcctggtaggcagcaaaagaagtcagcgcttgagtcgaagctcggtgagagagcacgcgcgggcgcaccttgttgagccggtcgcgctcggcgatgagctgtcgagcagagtagcgagcaggaaagcggcaacgagcaggcagagcagacggcggcagaagcaacggataggcggcagcagtcagcagactggtcgaacgtatgagggaacaagcgacaggaaggtcgccgacgcacgtgctgctcccactgccggaagcgggcctcctcgagcttgacctgctcagtgaaacgcttgcggagtccctcctcctcctccttgaacttggggttgtcgagcttgcggacctttgcctcgccaaacttgcgcgtctccatctgagcttgccggtctgaaagcggaagggccagggcgtcaggggctgcgtctggcacgcagagcaggaggctagcgacgtacaggcctcgtagtgcgtctcctcggtcgtctggcagaggtcgtgcatgtgcgttcgcacgagcagcgaccgcagcttccggaagtcacagtgcgcctcgttgtcaactgtcggggaaggtcgagtggacgtcagttcgaccgccgcagtgagtaggctacgcgtggcgatgtaccctcggcgacaccccacaggtactcgcggcccttgacaacccggccgtcggccgtcgtcacgtcggtcgtcgagccaatgatgctgaacgggatcgcggcggcgagcgccttggcgtgctcagccccggccgcgtcgtcctcctcgaccgggggcgtgtagatgcggatgccctgagcgagaatgacgtccttgatgcgcgacttgaacgcggccaggtcgttgggcgtgagcgtgtcggcctttgcgataacggggatcaggttgacgcgcgagccgaggcgcttcatgacctcgacgtcgagcggccggagcgagtggccggtcgggcggacaaagtagaggcaggcatggacccggaggtcctgcttctcggcccggacaggctgctgctcctgccgcataaacgactcgtgctggtcgtcgagaaactcgacgatcggctgccaggcgtcacggttgttgacatagtcgccaaagccgggcgtatcaatgaccgtcagcttgaccttgaaggccttctcctcgagctaacagagaggagcggagcgaagtcagcagcagtgtgcaggctggcagggcttttgtgagggggtcgcgcacctcagccttgatcacgtcgacctcggtcgtccggtcgagctggcgcgagaagcgctggcggtagttcttggcctgggcgagctcggtcgcaaagagtgtgttgacgagcgtcgtcttgccgagacccgactcgccgacgaccatgagcgtaaagtgctggcgagggtggacgaaaggaggcaggagcgacgagatcagcatcggggcggcttacaagcggtcgcggatcaggctgcaggcaatgcttagctggcagctcagaatccaggcagcttccgactccaaatcacgacgcttgtcctaggacgccgccagacgctacacctcgccgaagtgacacgccgacggcagggcgtgttaccctcttcttccctgcgcagccggccttcgctcgagtctcttgactctgagctgccgccagcggggcgccagctctgctgtcgcgtgagatcgacgacaccatgtctcgcatgccggctcgagtaccgctgtcaagcgagcagcacaggctgccgtccgatatgagtctgattcgacggagggaagagacgcgtgcgcgctgctcgcgcgagccgcttcaagcccaactcgagctcgattcgcccagctttggcttggctagatgagttacccaagcgaaagaggaagcagactcacagctccccgcttggcgacaatcttgtgccgctggttgggcaggctggagaggcagggaggccgagagcgaagggaggcgcgcgcgcgcggtcagctggagctcgttgcggcttcgagatgggccgggggcgggcagcttgcctctggagctgtacgcacttggcgatgccgatgccggagccggatggagcggcagaaggagcagacatggcggcggcttaaagggagaaagagagtgacgacggagtgggctgaagctcggagggacgaacggcgagatggccttggaacgatgcatcccgccggcgtgcgatgcaactcggcggacagtcattgaggaggcgcgcgtcagtgcctgccactccgtcgcgtcgccctcgtctcacctcgacgacctacctcgcagcagcaactcgccaaggcaatctcgcacacaggcaggaccgacatcggcgagatctcctacgcgactggcgtcattgaaatctcagcccatccggcgggacgcgcaggccgcgactccctcatctcctgacgatccagctcgaaaccggtgcaggcaccccattcacttcccagccgacaaccctctgtgctcccgaaactcgtcgagccagacatcacgacgccctcaacgtctctcgatcccgtcgcaacaccatggcatacgaagcggcccgctcgaggctgtcacgtgcgtctcagctgcgcgacttggctgccccttccgccttccctcctgcactcgcactgacccgcccttcgaacctcaggcccggaagagccgaagcgcttcttccctttgccaccatctcattcgctgcccttgcatctgaatccgctcccctcgccgacgttccggtccttctcgtcgacgtcctcctcggccggccgctttgacccgggcgagtcggcaccggaccggctgtcgtcctcgctgcggctcctcgccgcctgggagtcgctcgcccagcgctatacggctgtccctgttgccgaggacgacgagtgggacattgagacgggcacctgcgtccgatttggcggcctgctcgaccgcgaggtcggcctcgacggccgcgagtttggaggcatcgccgtcaaggaggaggacgaggacgaggacgaggacacgccgtcggtcgcctctacctcggtcactgcttcggtcctctcatcccctcctccgccctcggcctcgtcggccggagaggagtcggacgccgacgacgacctcggcggctgggcgactgagcaattcggcccgctcgtcctgcacgtccccccgccgccgcggggcggcgcgctccctgcccggcgcgagggcatgaaggtcgaagaccttgccgacctcgatgcctttctgcttgccgacggcgtccgcgagcgcttgccctcgcccgagcctgcgcctgcgccgcgcgctgctgggccgagcgagagctgggcgctggccgtcaagtacgaagagctgggctcgagcgacgacgagcacggcagcaagagtggcagcagcgagggcgagtcggacgccgacgactgggacgagatcgacttcatctccgagacgttcacgtcgccttttgtctcagtcgcctcgtcgtcggttcctcgccggccgggccgaccgaagacgatgcccgtctcgagcgcgctcctccctcgacgtcctttcgtcaaagtcaagcgcgaatcgtcctgcgtaccgtcactcgcctcctcgacctcgtcaatgttgccccctccgctcaacagcacacccggctggcggtcgtcgctcctggccaagccgagcacttcaccgctcgatctcctcgcgcagcgggcgggctcgtcgtcctcggtcgcttcttcctcctcgccatcggcagagtggtccacgccaagctcctcgattccgccggcttactcgtcgtcgcctctggtccgatgtgcagcactgttcgaaagcggcggctcgaccggcttacgagttgacccgtcgccccatccatatcggcacggtcaaagcccgccaccagcaaagcggcaacggctgtcgttagagccgcagggtgaccggtcgacgtcgatgcttgcgtctgtcaaagcagagctcacatcgtcgtcgcccttggcggttgctcgcggcggccagctgcggccttcactcgcggcctcggcccctccctcgcggatcccagtctttgccgcccttcgacgagcccgctcgcggccactcggtctccctaccgcggccgatgcagctctagcgagacgcgcagagcgcgagccttcgccgccacaaccgcctctggaccattcgacgttgttggcggcagtcaatgtctttgtcaaggcagagccctcgacgctggacgtcgaggtcgtcgcttcggtcgtccctgtcaagcgtggtcgcggtcgaccgcgcaagcaccctctgccgacgccggccggcccgacagctgctgcggagcccaacgctgacgcctcgcaccaagtcaagacggagcttctagacgcggtacctgtcgtcgtcaaacggccgagaggcagaccgcgcaagcacccgctgccggtgccgctcgcgcctaccgttatccctgcggatcccgagccggtgccagctccggcgatgtcactgctcgaggccgtcagcccgcaggaggcgccagctggcgtgctctcggcagacgaggacaagcgacgggcgctcgcactcgagctctttggctctgacgacgacgcgccgttcaacagcgtcccgaccgcggtcgctccttgtgcgagaccgccggcggaggagctgtcagagaccgagcgcgaccggcaggccaaggcggctctcgcgctcgagctctttggcgacgaggcaaacgaggatgacgtccttgtcatcgccagcgctgctagtcggccgacctcgcccgcggcgatggggggcattgaggtactcgacgacgatggcgaggacgacccgctggccgggtacgacgtctggtagccgccggatcgccgatctgcatgttgtacactttcaaatgcgcgacgtcgtctgttaagagtgggcgcgagcatgggcgtgagaataggcgcttgaaatcagagccagagccgcaggtcatcgcagcgtcggcggcgagggcagcgcgcagtggcgaatgacgaccccctccccctctcgccctagacaccagctatagtcggagaaggtcatagattcgtcgtcattcatcaggcgtcggtcgagaagacctggttgcagaacatctcgatctcggccttgtggacgttcttgcggccggtcgcgggcgacgcgctcgggttgcggccggcgtagagcggcgtccggtgggcgtggtgctcggtgttcttgaagacggtgtagagccggggctggacatacgaccaggcgccggcgttgaggggctcctcctggcaccactggatgtcggcgttggggaagcggtcgatgtacggcgtcaccatgtcgtacgggaaaggcgaaatttgctcgacccgggcgaggacaacgtccttgatgccgcggtcctcgcgctccttcagcagggtctggtagctgtcaggcgagaagggaggaaagggtgtcagcaaagggagtcaacgagtagcagcggaaaggggattggggacggacacctggccagagcagagaacgacgcggcggacgtccttgtcggcggcaagctcggtcgacgtctcgggcaggaaacgctcaaagccggtgtcgccggtgaagtcctcgagcgcggaccgggcgttcgggtgccggaggaggttctttgagaagaagaggacgagcggcttgcggaagtcgcggtggacctgacgccggaggacgtggaagtagttggcgggcgtcgtcgggtagacaatctggaggttgcagtcctggtgctggcgttggatgccctccgagtccgggaagacgttcgggtggtcgtcgcagagctggaggaagcgctcgatccggccagacgagtgctcggggccctggccgtcgtagccgtgcgggagcgacatgacgaggccggtccgctggacccacttgcgctcgcccgaggcaatgaactggtcaatgatgacctggcagccgttggcgaagtcgccaaactgggcctcccacatcgtgagcgagttgggcgagacgagcgagtagccgagctcaaagccgaggacgccaaactcggagagatgcgagttgcagacggtgaacgacgcctgatcggccgcaaggtggttgagcgggatgtactgcgactcgttctcctggtcgtggacgacggcgtgccgctgcgagaacgtgccgcgctcgacgtcctggccagagacgcggacgtgcgtgttttcgagggcgagcgtgccaaaggcaagagcctcggccgtcgaccagtcaatgttcttgccctcctcgaccgtcttgccgcgcgttttgaggatccgggcgaggttcttgtgcggcgtaaagccctctgggaaggtcgagatgatcttgccgatgtccttgagcgtcgactcctcggagccggtcggccgggcgggcaggacgagctcggcgagctccttgggcgtcgggaagccgtcccacgacgacgagagccactccttgggcgacggcttgtagtccttggagccctcgtgcgcgcgctcgagcatctcccagacccaagccttgtgctccttgatcgtctgctcggagaaggtgccgtccttgacgagcttggccgtgtactgctcgaggatcggccgctgttcggcaatcttcttgtacatccggggctgcgtgaacgacggctggtccgtctcgttgtggccgtacttgcggtagcagacaatgtcgataacgacgtccttcttgaactcggcccgccagtcggcggcgaggcggcagacgaaatcgacggcctcaacattgtcgccgttgacgtggaagatgggcgcgtcgatcgacttggcaatgtcggtgcagtacggcgtcgagcgcgagaagcgcgggtcggtcgtgaagccaatctggttgttgacgacgatgtggatcgtaccgccagtgccgtagttggggagtgagtgcatgcccatcgactcgtagacgacgccctggccagcgaaagcagcgtcgccgtggaggaggacgcccatcgccgtgtcgtggttgacctcgtcgccctcaaagtgctggatcgcgcgcgtcttaccgagaacgaccgggtcctcggcctcgaggtgcgacgggttggcgacgagcgagagcgagaccttgttgcccgacggcgtcggccggacatagttggcgccgaggtggtacttgacgtcgcctcctcccgagtcgtcgtcgtccgaggcgcccttgctgcgagcgcggaagacaggaggccgctgtcagcaaatcgcacacgaggctctcggctggccggcgccagggacgtacaactcgttcaggatggcctcgatcggcttgcggatgacgttggcgaggacgttgagccgtccgcggtggggcatgcccatgacgacggccttgacgcccttctcgaccgaccggtcaatcagggccttcatgccggggatgagcgactcgcagccctcgagaccgaagcgcttctcgttcgggaacttgctcgcgataaacgactcgaacgagtcggaccacatgagccggtcgaggatcatgcgcttctcctcgacagagtagttccacggcgccgggttctcgacccgctgccggatccagtcgcactggtgcttgtccgggatgtggacgtactggatgccgacgtccttgcctgcgagtcggcggcggtgtcggtggcaggcggagatgatcggcgacgcgcgcgtcgagggtttcgggaaaagcaggagatggtgggtcggcgacggtcagccaccctggtccggatctcgcgcgaagcgcccctcgctcgaataaggaagtcgcagcagacgtacagtagatgcgcttgaggtggtggatgatggtccggagcgacatcttcttggtctcgtcggtgatgaagcggggcaggatgccggggccgagcgtgaactgcgaaagaagaagagccggccggacagtcgaggtcagcgtcgcctctcgagtgatgtctcgcccgagcgaaggggaggaaccgacctccttgtcgaggtcgctctcggtccagccatagtgctcaaggttgagctcggccgggcgctcgttgctaaggtcgtgctccatgatgccgagcgggtcgagcgtggccgtgtggtgcccgcggacctggtaggcccggacgagcagctgaaccttaaggtggtccgagacctcgcccgagccctcgccgagccccggtgcgagcgtcgctgggtgaccagcaccgatggcagagtccgaggcgatgcccggcggcggcgtaaaggcctgctgcgacggcaggcccttgtcgaggccggagaagtaggtcgcccacgagacatggaccgatttcgggtccttagaaaggcgacagaggaggagagcatgacagtcagcaggctggtcgcaaggcgcaaacaagggacggccaggaggcgagggcggcagtgtcggagaagagggaagctcgcgggcgagatgacgcacctcccgccacgcgcggtacatcctgagcgggagcgagggcggcaacgcgggagacaaaagtcagccaggtagaaggcgctcacagacgcaagccgactgcctgccactcactcggacgtgtagtagccgttctgcgaggtcagcatattgtcggtctgcgggcccgggctggcagcggcaaaagccctggccgaggtggcgagggcgcggacggcctgccggctggcgagctgcggccgaggtatcggcgagcgggcgagacgacggagcatcttgcttgggagtggttgggttaggggaggcgactgggggtggtggtggtcgtcgtcgagtcggaggggggggcgtctctctcctcggctatgctgcgacgccggcaggagcccaacgtccgcggaaaagggacggacgggaaatcgagcgatggagcccagcttgggcttccgagcagtgccgccggcaacgaccgccctcgcctgatctttacttgtggcaccagtcatgcttcaagaaagcagacagcgagtagcttctagctaccagctatgcactcgtaccgcgcttcgaatgcaaaggaaaggcccttcgaggtctgcgcaggagatggcgccctcgctgtcgcctgcccaacttgggcttcgcccacccgcgtgctcggccttcgtcggtcgaagcctccgtgtgaccctcgcgtcggcctatgcgaccgcgtctcgggcggcgcaaccgagcgggctggcttcggacgagccgggcgaggccagcgagcgtgcgcaagtcgacggctgcgatagtcggtacgacggcggtcgaggttgacgggtctgccggcggcccgaaccccttcctccgtcttcgtcgctcgtcggctgagacgatgcttgtcgagcccctgctctgctctctctggccgccttcggttccgatacggcgcgacggagctccttctgatcggcggccttcctccatatgacaagctgcgtgccggcagcatggcaacgccatcaacaagcgtctgcctgtagactgcgcgaccgtccccgcacgtcgtcctcggagggaagcgatgccgcctcgttgaccgccgacaaccaccttctctcaaacaatgaccgcccccgtctgccagttccaagaccgcctctcgaccgccctctcgtcctcggccagcagcgccgacgccagcgggacgagctcggcctcggccgcgggtggtggggccgaggggcaggcgctcgcgcactcgcacgacctgcttggggccgctgggcatggacacgaccacggcgggacctggacgcctgaggtacgtcgcacagtgaccttctcttaccagcctagatgtttgagcgtcgccactggaagggcgaacagaaaggagccgtcgttcggggatctcgtcgtcgggagaagagcgcgagcaggggctaatgccgacctcttgctcgtaaatctcgcccactcatccagcacggccatacgcacgagcacctcgagcacgccggcaagtttgccgagcgcgaccttcccaactggtccggtcgcgactgggccgagcggggcttcacgatcggcattggagggtctgttctttcgcgcgcttgcccactcctcgactctctgactcatgctcggctttgccaatggcgatggagggtccctcggcttggtaacggagggctgacgatacacctccccttgctctcaggccggttgggtccggcaagacggcgctcatgctcgccctttgcaagcgcctccggaacgagtacaacatcggtcggtcctcttccctgccagggtgccgcgcagcaacgactcaacttcgctcaccacccaacctccctctgtctctcgtacagccgccgtcacgaacgacatctttacggccgaggactggtaaggcatgcgtggcatttgagcaggctcgagtcagcgctgacctgcctccttcgctcgacatcgccttcgcagcgagttcctcatcaagaacgaggcgctgcccgagggccgcattcgcgccatcgaaacgggcggctgcccacacgccgccatccggtccgtcccgtctcaagctcgcccccctcttcaccagcttccgcccactgacccgactcccctcttttcctgtcggtgcggccgacagggaggacatctcagccaaccttggcgcgctcgagcagctccaaattgacttcggttgcgagctcctgctcgttgagtcgggcggcgacaacctcgccgccaacttttcgcgcgagcttgcagactacatcatctatgtcgtgcgtccgccgcgagagcggcgcccttgagggccgatcgaggtctgacctcttgctctcccttctctccgcgcgccagatcgacgtctcgggcggcgacaagattccgcgcaagggtgggcccggcatctcgcagtctgacctgctcatcatcaacaaggtgcatccctctcctctaccctcggtcatctccctcccctccgctcattcctttcctcccctgcccttccagaccgacctcgcgccgcacgtcggtgcctcgctcgaggtgatgaagcgcgacgccgaccttatgcgcgaccacggcccgacccagtttacgtcgatccggaacggcgagggcgtcgaggcttgcgtcgagctcatcctcggcgcgttcaaggtcgcgatggcggggggagggggcgggaagggcaaggcgaaggtggtcgcctgaaggggacgccgcaaggagctccggccgacggaggaccccgttgtatccctcctcatctctgatgagtctgccttcatagattaaacagaaaagcaggaggcaggatggtcgcggagagtgagccgccgctcatgggccgatcggttgagccctcacgggaggtagcgcccagccggaaagtaagggcggaaggcgtcgtcgcagaccatgtcggcgctgctttcgacgacctcgtaaagttgcatgaggagctgcgggaagcgccgcttgaagtactcaaggaagcccgcgggcagcggcgacatttcctcgcgcaggccggcaggcatgtcgaggaagtggtgccgcttgttgcgcaaggcgcgcaagaggtcgcggaccgagccgacgtcgtactgggacagattggcgacaagaccagagatcagcggatgagcgagtggtgcaggccgcccagagtcgcctcaccttgcgatacttgccgagactctcgacaaactcggggctcatggctgccatccagcctccgggcgggatcacctttcgagcgcttcgctcgagggcaaccagccaggggtgcggcgggtcgcgctcgaggatctcgaagcgatcggacgcgtcttgaagataggcgagctggcggcctggcggccagaagcaagggtgctgaaccacaaaagacagagacggcctgcagaaaagaggttttagcgctcgtccgatcacctgcctctgcaggagactcaccgagctctactgtcgaatgcgaccatccgagagacgaggttgagcgcctcttgctggcgatctcggtccaaggagcggaagctgggccggttcttgacgatgtttcgctcgcgttccatccgctcaccgctgccgagaggatacagcggcaggtcagcgcgagttgagcgtgacagctcggcgaaacgaagtcgacgcacaaggggtggactcctccgctcagcgcccagccgaggacgcagccaagggcaaagacatcaaccttccggctcagccttgctgatcggcccgaaagctgaccggcgccgctcccgcttccactattctcgccgacgacttcccaaccggcagaatcgccagcattgtcgctcgacaactcgagcaaaagctccggcgcgcgccaaccgggcgatcccgtaggaaggtgaccggttgccgaggccgaatagagcgtcgcaccgaaggacgactggtcgagcgtctgctgctttgcgaggccaaagtcagagatgagcaggcggatcgagcccgacttagtgcgggtgacgaggatgttcctgcgggggctgcagtcagcatcgtcgtcctgaagcagggtgctggtgggacgtactgcggcttgatgtcgcggtggcaaattttgagcgagtgcaggtgctcgacgccttgaacggcgcccttgagcgcctcctcttcgcgacccttccactcggcccacatggccttgtcgcctcggggaccgcgttcgacgagctcgcccaggctacagggacacagctcgagcgcaatgagcagccagggctcgcgatgttcttggtagaagtagcggacgatgtttgggtgatggtccgatgactgcaggagtgagatctcgcgcgagtggagcgaggtgaaatgcgaaaggagccgcttgaccgcgaccggcctcgattgaaacgttccgcggaatacgagcgtgccgtggctgcccgtgccaagaagctcgtccgagatggacaaggcctctggcggaggaggagaggtgggcgaagaagtaggcggtgccgaaacaaccgcaccgagagcggccgcaggatcgagggtgggcaaggtcggggtagcctgagcagacaccagggccgaggccggcagagagtccgtagccgagggtgctgggtcgtccgtcggatcggcatcgccctcgtcgtcctttttgcccttgcgcttttgacgccgcctcttcttcttgccgtcgacgtcggctccgttctctggggtgagagagctcgttccgatcgggtccaaggactctgctgcagctggaacggcctcgaccgccggtcctgcctcaggcggaactgccagctcgatcaggcttccagtcggtgctgccgacgaggtgtccgtcggctccggcttgtcctcgaggggttcggaagcggacgacgtcgtcatcttggcgccaggccgacgcgcgcggaagtcgaggaagacgaagaggggcagcgcgccggccaggagggcaatgctgagccacttaccgagtcggctccgacgcgacttgagcgcagctggatcggccgcatcgaggcggttgccatcgttgtcgtcgtttgatccggcctcgatcatgcgccgttcgactagcctggccatgccttcgccgagctgggcgtcccagacctcacgcgagaggccgcgttcgctctcgctcaggttcggggcgttcaggccaggatgccagccctcaagactgccgatagaggggggcgggagggcgccgacgatgccgaggaaggggtaggagtcggttgacagcgccagtaggtcgttgccgtccgctccgccgccgcgagtgacaaggacgcctccgccactcttgacgacgtggccgtgctggtcgacgatgagcgacccccgggggttgacctgccggctgacaaagaggccgcccgtttcgcgcaggacaaagacgtcccagaggccgatgggaaagtcggattcgaactcgagcccccagagcatgaccagcgagccggacgacgtctctttcaggcaggcgaggcccgtcttgactggcgtgacggccagctgatggtactgcgagtcaaggctgtgcgggagcgagaagatcgacgccggatgctgcgtcgaggaggaatgaggagagaaagttgtatagacgagcgtctgaggaggtaagggtgggatggagggtgtttggacgcgcagcgtgtaatctgcgtagtcgggccgcccgaccggccgtcagcgcctcggtcggtcaaacgacgtagagcgaacactcaccggtccgagtgagccacaggatctgccgctcggaggcatggcggtcagggccctcgagatggtccaggaggtcatccaagtccgagcctcgggcgccggccgtggctcgggggcccggctcggggctggaggtgtcgacggcgttgacgatttcccctgagcgcatgtcgagcgcgagcaacgccgtcgactgggagccgataaataggcgagaagggttggggtccgaggcaaagtgaaccggcgacgactggaacgaggcttgtacactgtcgggcccgaccgctcgtcagcagactgcttgtcgaccgagacagtcgaccagaaggatacgcacaggtctggcacggtaacaccgagcttgttgagctgccacttgccggcctctttcgtcgccaggtagaccatgccctcccgggggtcgacaatgaacttctcggccaggcgttcgtcgtcgggtccgacgttgatcccggctggccgggcctgcgcgccctctgcgctggcaggcggcagagccggtgggatcccccaaacttcctcgccggtgtcacggtcgagcgcatggaggccgcccgacagcgtcgatacgagcaggagcggaaagagctcgacgtcggccggctggatgacgtcctgggctgccgagctcccgccaacggctgggacgtaggcgagtgccggcggagggtcgagtgtcggcaccgcccggataaacggccggccgaccaagaccgaggccgcaagcagctggagcagggcagacggcaggagtcgcatcctaggtcatcggaggagggacgtcgtgcgttctctggggcgagctgtgcgatattgaggtcgagatcagggtcgggagggcgtttcgacggccgcccagccgcgcgagctggtcggcgccaagctcgaagtcgagctggacgctgcaggtcggcctcgctttgcaccgcaaccctcaccctcttcgacgcctgctgcccaggcgagcgctcctcctccagcacggcatgccgtccgctcctctcgctcccaatccaaggccggcggcggtcggtgctgcaggcagcagtgtcccaacgagtgcgcgggcgccgtcggctcaggccgactcgcccgcagcggcccccacgccaacgaaggcgacagccggccggcgagcatggtcgctgctcaagatggtcttgaactttttgatcgagcagtggttcgtgctggggattggaatcgtcatcctcctcgcccatttcttcccggacgtcggccggaccggaggaatcatcaaggccgaggttcgcgtcgcttcgtgcctctcgccagctgctggatgttgaggctgaccggtgttgccgtctctaccttccgtccctcagtacacggtcaagtacatgctgatcgccatcatcttcttcatatcgggtctctcgctcccgctcgcgcaccgtgcgtgatggcctggctcttctgcttgctcccagcactgatgcctccacactactccgcaaccggacagtgtacgctcgggccaaggactggcggttgcacatcctcacccatgcgacctcgttcctgctcttccccgcgctcgtctttggcatcgtctcggccgtccaccggtcggacccggagtttgaacgttttgaccgctgggcacttgcgggcatggtcgtcctaggctgcgtgccgacgaccgtctcctcgaatgtcgtcatgactggccaggccgggggcgaccagagcgcagctacgatagaggtcatgctcggaaacctcgccggtgagtccgcacatgcaagaaggtggaatgccttgactgacgatcgccccctcaccctgtcttcgcaggcacgtttctctcccctgcgcttctccagatgttcctgtcgacctcagagacctggtcgttcggtgcgccgagcgctggaccgggcggtacgggcgagatctaccgccaggtcatccagcagctcggcctcaccgtctttgtgccgctctttgtcggcgaggtcgtccagtggctcattcctgtctttgtcaagaagtggcggctcaagctcaagctcgccaaattcgcgagtctctgcctgctcggcgtcatctggagcactttttgcaacgccttctggtctggcgcgtttgaggagatgtcgaccccaactgtgcgtcctgcctcgcttgtttcggccgacgcaattactaacgcctcccttcctccgacatcgtcagatcctcctcgtcctgtttgtcaacatcctcctctacatcgttttctcggccttcctgtttctcgtcgctcgcattctcccgatgccgcgcttcctccagtcgtcgcatctgcagcaccctctgctgctttcgtcggccaaggacggcgtcgtcgaggagcgcgtcgaaagcggctggtgggaggagaagaagctcatggacggaccgaccactgtcgcccttctcttctgcggagcggccaaaggtcagtcaaataatgttcctctgctacctcgcatgccactcactaaccacttagcccggccactcgaacaggcatcgtcctcggcgcgccgatcgtcaacatcatgtactctggcttgcctcgaatcgacgccgccaagattacgatccctgtgggtgcgacgctgcacttgtcccgtaggcaatgctgaccccttccgcattgcctctcctactctgagcagctcgtgctgttccagggctcgcaagtcgtcctcggccaggtcaccgtcagcctcgtccgggcctggatgcggcgggtcaaggccaagaacgagcgcttgctcaaggcgtacgcgagcaacgcatccgacgacggcaccctcggcggcgaggagcacaagcttgcctcgcccgacgcagaggtaaaaagggccggacgatcgacggcacgcctcgagtgaacgccctcgaacagaggatggagcgcgcgatcgaggtaggcgagaggaagttgccttagaagcgtccgctcagagcatagacatcggatagacttgtacgcgatcgcatcagatcgtcttcatcttgctttcgcgccgctcgccacgggtgatgagcttggacacgcggccggccatgtcgatcgacatgatggcctgcgcaaggggggaaggtcgaccatcagcagccgagcctacgcgaggcgcccttcaaagttctgatcgactgaccggaataagcgcaaagggaccgtgggccatcagcagctggatgcggtgcccaggtccaatcttgcgcgagtagatgtcccaggcctcgcccttcgcaacctcgggaatcgtcaggacgagcgacaggacggggacgagtgtcgtcgtcgtcataacggcgtaaatgagcagcggcaggtagacccgcggccggtcgtaccagaggccgagcgctccgatgaagaacatcggcaggctgaagaagccttcggcggcgagcagggacctgcgagacggagaggactcacgcgtatcagcaagtgatcgcgaaggctggagcagatacgaagaacgcaccaaaaccaggtccactctgactcgtgaccggtcaggccgaagacgccgcgcatcatcgggtcgcccgagaggttgaaatagaagtgaagaaggcctttgagctggtaagggggacgggcaggcggcggtcagctcgacgtccttggccggcggtggcaccgctggcttgagtagctgccagcgaatcgcaggaccctcgaccgaccggagctggtacgagatgagccgggtagaagagctgcatgctgatgggcgacgacaagggagggtccggcaggccggcgtcagggccagagcgcgttgagagggcggcagacaaggatgggacggcacgcactcgacgcagagcgccgccggctgtggcaggggcgcatagaggaaggcaaaggtcaaccctctctatgtacgagggtcttaaaagcaggatgggacgcacgatgtgaatctagagacagtggaggagcggagaagccgaagtcagctgcgtcgacgcccagacgtaggttggcaggccgggagcgacgcacgaggaagaagataaagtagaggaggtcgagcggcctctcgcggaaagatcggacagccatcgttgccgagtcgatcgtggctaagagaggatgcggctagcaggcaaaccgtcgggagggtgtcgatggtcagaagcgacatgtctgcgacgcgacgaggcacgggggctggacgacggtcgctccgtcagctgaagcccccagggcaatcaagcgatacataggcccagctcggaccagattagtgccaagcagagagtgacaggtctacagatgctgataggctgagaggtggcccgacctcagctggcctgtcgacggtacaggccgacccggcgtgcgcagctgcctccatcctgtctctcgaccatcactccgctcgagcccgcctgcccatggctctcgcctcgatcccgcatgccttcggggccgctctcaagcagcccgccacgtctacgtcggtcttctgatgcgctctggcggcaagaactttcgtactgaccctgcccatcgtccactctttccagcctgcttttcctacatgggctaggcgacacaggtcgggcactccaagtctcgagtcccctgacaccgctgacgaattcctttgatcacacaggaaccaactgggctgctatgctgcaagataagctggcgccgaccctgccctcgctccaggtgattgcccctcatgcgccggtcggaggcctcaccgtcgcccgtggccagcggatgccgatgtggttcaacatcctcgtcgaggactcgcgcgagcgaccggacatgcaagatcaagcaggcatggagcgaacgcggctcatggtggagtcgatcatccagcacgaggtcgagcaagggcgctcggtcgtcctcgctggcttctcacagggtttgcgttttgccgcatccccttgcccagacgccactcggcctgaccctctctgcgaccctcacaggtgccgtcatgacgctgtacgctggactgcggagcgattatccgctggcgggcctcgctctgctttcaggcttcgtcccattagctacgacgctttcctcggtgcgtctgtactggaggctggcactgcattgctcccccggccagccgctacaacagcactagaaaagctgaccttgtagtaatgtgcttgtgattcctcccactcgtgctgcagctcaagtcgccgacgttgccggcccgcctcccgatctggcaggcgcacggcaccgccgactccgtcatcgacatcagctacggccggaagctgcgcgattttttgcggtcaccggagcttgggctcggcgctgggaacgagatcgcgtacagggagtatgaggggctcccgcattcggcctcgcccgaggaacttgaagacctgaccgactggctgcggcgtgtgctgcctgcgccgacacaggctgcgctctgaatgctgcttgcgtcgagtcgctgcttgcggattgcgacgcaggtaaggctgatgcagagacatttttctgcaagcgaatatcattctatcgctcagcatcgctacgggtatgactcaagcgtcgtcgggaggccagcgagcttcatcttgacggcgatctgcgggatgcgggtgagcgagaggtcagctctatagagcaggcggagcatgtaagagacagcaagcgaccgacttcaaacaagtagtcaaggcactcggcctgcgtcttggcctgctcccaggtcgagcctgcagacgggcggtcgttcaaaggagggacggatcagccgctgaacgatcttcttgagctcccattgtaaaccgacacaccccagatgtagacgccgtgccggcggacgaggacggcgccagcctccgggtagcgctccatcgcctcggccatcgagtcggtcagatcctcctcgtctggcgtgttctcgatgatagggatcgtcagtgtgtcgaggaaagtaagtgttttgccggtgccgccgcgacggatgcccttgatcatctgcgttcgggcgatagagcatcagcgtcaggcaaagatgatcaaagtcggttgagccggtgacgcacctcctgatgcgagatcgtgaactcgttgcccggccagagcagcgtagccatgactgagagccaggcaggttgggcatcgcggcaaggcgtcagtttcgggcgcacacatcgaaggctggagcgttgacagagggccgcaggactgaccggcatgctgcgagtgcgtgtggatgcaggcgccggcgtcacgcatgcggaacgcattccagaacaagggtgtgcaggcgctctctttgaggcccttggtcgtcggcacgcggagaaactcgcgcgtgctccccggtgtcgggacggccgcctgcgggtagggcaggacaaagacgtgctcgggccggatgcgctccttctggacgcccgacggcgcgaggaagacgtgcgagccctggcggatcgagatgccgccgccggtgccggtgacccaaccgagcttgtagaactgggcacaaaggtcgccgatgaggttggccggctgatgatacgaagacaaggtcagctctgagcgttgctctgcgcgttgagctcgctcttgagagctgctcggctgaagcggtagctccccaggcggagggagccgagtacccacgtgcgacgggtcgtccgaggtgatgagggcgtcgttcgggtcgacggccgcaggtccggcagactggttcgaagaagagcagcagcaggtcatgtcggtcaaagatgatggtcgttgggagcggaaaggggtccggtcctgtcgtcggcgtcgacactcgtgcgcttgcgccaggcttggctgagcgtaatttcgttacgctcgggggcgtgactcgcgcttcattcagcccgctggcttggaacgcgtcgcgcctccggtccgtcccgcctcgatcctcctcacgacagcatccccttcgaacagctctcctcgtacaaaggaatcacttctgcacgcactagccctctgcctacctacctcgactgcaactgaaacagacccaccgccatggcttcgtctaagtcgacgccgcagctctcgacggccacctcgtcgccgcccgccaccggcctcgtctcgccggccgacgaggggctcgccaacaagagcgccgccaccgttgccgaggtcgaggacgatgccgaggacgacgcgcccgaggccaagtcgttcgaccctgactttgtagcccaggaaacgaccgaggtacggccctcccgctcgtcctcccttcgcctgccccgatgcctcccagcctcaatttgcccggcgcacgccgcctccgatcctgcgcccacgcctacgcgttcgcgcctgtggagccctgatcaccgtcgtccttggtcggtttgctgaccctatgccgtcttctcctggacaggcggccaagtcgtcgcgcctgacgcggctcaactacctgctcgagcagtcgagcatttacaccaaagtgcgtctgtcagcctgcgcgcgttccaaggcgcgccacctgtcgcgtgcctcccgacgcgacgtgcctgcttccgcccgacgtcgctgtcgacgctgcgagcagttgctgaccctccttgtccgtccgtgacagatcctgcaagacaagatggagaagcagcggctcgaccgcgtcaaggccgaagctcgtcaggcagccaagaaggagaagctcgcggctgaggctgagcaggatgcgcagtttgtgcccgtcgccgagcgccggagcggccggaccgcggccgaggaggcgaccatcaccgagcgcaagaagaccgacgtcaagggcaaaggcaaggaggccgtcggcaagcgcaaggtcgagaagctcgaaatggagaatgcgctccaggaggccgtcgcgtcgacctctgtgcgtcgtgacctcactcctgtcgcaacaggagcttccccgctgaccactatccctcgatctgctgcagaccaagacggacaagaaggcaaagaaggtcaagaaagaggccgatgcaccggcggcggcgtccgagcacggcacgcagcccgctctcgtcactggcgccgtcatgcgcgactaccagctggcaggccttcagtggctcatttcgctctatgagaacggcctcaacggcattctcgccgacgagatgggcctcggcaagacgctccagaccatctcgttctttgcccaccttcggtccaagggagtctggggtcgtgagtctgcttgtcaaccttcgcagcttgtcatcgccatcgactgacgccgcctcttgtcttccttctctttgcagccttcctggtcgttggtccgatgagcgtcctccagaactggcagaacgagtttgccaagttcacgcccgacgtgcgtccgaacacatcttgagaacggcacagcaggccactgaccgacctgcccctgccacctccagatccctaccgtccagtactacggcccgcccgaggagcgtaagaacatccggcagacgaagctgtcgccgccgaccgacgcgaccggggctaactatgccggcaagatgccgggcggcggaggcatgtcgctcaaaaggatgtcgaaggcccagcgtgcaaaggccaaggagccgctcaagctcacgcccaacacgatggcaacgttcccgatcgtcctgacgacgttcgtcccaaccttcttcgactgtcgaagaggcctagttggctgacctactcgttccgccccctccgccagctttgacatggcgatcaaggactccaagtacctccgcggcttcctttggaagtacatcgtcgtcgacgagggtcaccggctcaagaacatggactgcctgctcatccgcgagctcaagaccttctcatcggctaaccggctcatcctgaccggcacgccgctccacaacaacctgtcggagctctggagtctgctcaatttcatcttgcccgacatctttgacgacctcgactcgttccagcagtggtgcgacctcctttgcttctcgatcactttgcttctcgatcatgctggcgtcagcgagctgacggccgccatttcgcaggttcgatctcgactcggacatccgcaagccttcgaacccaagcgcccccggcgagaagctcatctcggacgagggctcgcgcaacatcgtcaccaagctccactcgatcctcaagccgttcctcctccgccggctcaaggtcgacgttgaaaagaatctgccgccgaagaaggagtacctgcttcacgcgccgctcacgtcggcccaaaaggacctctacgagcaggtcgtcgctcgcacgctccgcgctttcctcatcaagaaaaaggccggcgaactcggctcggccgatgacgacagacacatcccggtcgatagcgacgacgaggagagcgcgattgagcagacgctcctgaccgaagaggccaagccggtcgagcggcacgaggacggccggattaagcgttcccagcgcgtcggcgtcgtccgcaaagactacacgaccgacctgatggaaaacgacgacaagtggttcgagaaggtcgagaacgagcgcgaggccgaggaggagcgctcgatgacgacgaccgctgaggaggccctcgcagctggtcgggcgtacgagaagcggcttgccagtgcgtcatactgttctccgctcgtgttgagcatgctcgctgacgcccttcttgcgacgtctctcagccaagtcggtcaacaatatgcgcctgctgaacgtcgtcatgcagctccgcaaggtcgcgagccacccgtttctctttgactggccgatcgaccaccggaccggccaggcggtcatcaataaggaccttgtcgaggcctcgggcaagatgctcctcctcaaccggctgctcgacgcgctctttgagcgcaagcacaaggtccttctcttctcgcaattcacgaccatgctcaacattatcgaggtcagtctgacgttcgccgtccccccgcgcacccgaacgagaagtttgacccctcctctctttgacggcgacaggactgggcgatcgaatacaagggcattaaggtctatcggatcgacgggtcgaccaagcaggtcgaccggcaggcgcagatgaacgccttcaacagtgagggcgaggaggacggcgtctgccggctctttatcctctcgactcgcgccggcgggctcggcatcaacctcgtcgcggccgacacagtcatcttttacgaccaggactggaacccgcaaatggacctccaagcccaggaccgtgcgcaccggatcggccagaagcggcctgtcctcatctttcggctcgtgacggcccacacggtcgaggagaagatcctcaagaaggcaggcgccaagcgcaggctcgaggcgatggtcatcgccgacggcaagttcaagggcggtgcaggctccgacaagcgcgtgagcgcgatcaacgaggcggcggcgctcctcaagctggagggcgacaagatcaacctcgtcgacgccggagacaaaatcatctcgtgcgtgcccgtcgcgcgacaggacttgcacctgttctgcatctgacgttgcctgcgcttcttgcgactctagtgacgaggacctcgagatgctgctcgaccggtcgcccgaggcgtacggccggatcaagggctggcactcgagccaggccgtgtcgaccgccaacggaccgagcaaaactaagggcgagaagacggccttcgaggtctacacggcggccaaggacgacctcaatgacgacctcgctaagctgcaggaggaggaagagtgagcgtaggcgggactcgattcgtaccatcagactcttatcaggggggcgatccgggcttcatcatggcacttagcattggactcagcgcctgtctgcgccctcgccttgattacctcgcgccctcgccttgattacctcacgcccggtgcaagtatcggcagtcggtaagaaaggccagtccgatcaccatggcgacggagaaaggctgctgcgcggcggccgaggggcggcacgggacctgctgctcctgctcgtcctcggcccgtcgccatctcccgccaaccatcgcatcaagaggcccctgccaagccagcccatccttccatctccatgctcgccgtccaggtctaccgccctcaggcggcggcctcgccggcgctcgtcagccaactcgccgtcccgattcggaccgcgggggcgtcggcaacaaccaacgccgatgccccgaccatctcgcctctcgtcctcgacgcctctgccgccatcgccatccgaccctcgccgctccggatccctgagctcctcgctctgatcctcacggccctttcgccaggctcgctctcgccagccctccttacggtccactcgtcgttccatgcggccctcctgcccgcgctctggcgctcggttaagctgagcgaggttccgcgctggcgcaagttcgtccgcgccgtccgtgagggcagcgagggtgcggcttgggtctactctctcgaccttcgcatcacaacagacgttctcgaccgcgggctcgttgacgggctcggccgtgagctcgagcgcggccgcttcgcccgcctccggtcgctcgccgtcctgggctcggtcaagtcgacggccgcactcgtcaacgggcccttcctcggcaacctcgacgcggtcgtcccgcagctcagctcgctctcacttgacggccaccttccgccggcggccttgctccccctgctcgcccgttcgactacgctcgactcgctcgccctccaagctcagacgctctcatgcctgccgccgaaggccctcttcgatggacctccgaccctccgtcagctcgacgtcctgccttcgaccccttacccctgcccaagctcggtcgtttacccccgctgggttgaagagctcgttgacgccgacgttgcccacctcgaccgctggctggatatgctccttgacgccgccggcccggctcggcccgaccgccggctcgaggtcatcctctctgccttctatcccgccgctcggatccgcacaatcgtccgcgagcgggccagagccctcggcaagatcggtgtcgacctcgtcggcgccccggtcaaaggtcagcctgttctgcctctctctcatttgctcgtctctactgacattcgaccaccattcacaggatcggccaagtcatgaaattcgcataccattcagtccaatgtaaagtatcgcccggccgatctgttgtcctcgtccatctcggtcctcgcctgttgcgcttgccctcgccgctcctcttcgatacacgctactcgtaacgaaatctgtaatagcaatgtctcatagcaaagaccaatcgtaaagagagtcccggggggtcgtatagggaagcaatcaggcaaaggtggcgcagaagaacaagagggaaacggaagcgagtcgtgagataattcgtgcactggctggatcaatgctcgtgaagttcgtcgaggaaggcgagccaccgcgccttactgatcatgccgacgtagtgaccctgctcgttgaggcagacgagtgagcggacgccgagcttgacaaacagctgctggacgagttcgagcggcgagtgcagctgaatcgtgaggggtgcctgtgagcaagaaaaagaggatcagcctcggcttgacgcgaagggcaggaaaggcggtagggattgacctggtccatgtacgtcgagaggtcgagcgggtcgcgttccggtacgattgagacgttggccgagaagggcgagagctcggcgtaaaaggaggtgcgggtccgggcctgaggacgagggcggaggatgcaagtcgcatcgggctggtcctggaggttggctggcgcaagggtggcgatagacgaccgtcagtgatgagacgggagcagagagcatccagcagcgacacaccgaggacatgttcgagctcgtttagagcgagcacgccgcgcagccgaagcccgccggccgccctctcgaggaccgggaatccgccgtcggggccgacggccgcgttgaagttggcggcgagagcggtgagcgcggcgaccgaattcttgcgatcgcatcggagaactggcgcctgggcgtcgagctgttgaagggaagaaaagcggtcgtcagccacccggttcccttgactgctgccaggcgagcgccaggagtagaacgcaccacgtccgagatctgcagctggccccagcggctatttgaaagcagaataatccgtgcgtcagccgtcgttgcacacgagtgaaatggaagatgaaacccgcactgagtctccttggcatcgaggaacggaatctggttgagttcgatgacaaggtcgtagatgcccttcggctcgagtgcatcggccacctgcgagattgagcgaggttgcagtcagcacgagcccgctcatcaagcaaaagacaagatgtcctaccgtcttggccacaaggacaccgaggatgacgggctgaagggtacattgcaggctatcagccagcgctgtagcaagagtatcgtaacaaacaaggccgccggagactcacgacggcgtaggtcagagagcctgtgagctccatcacgatgacagccagcgagacggttgtgcgcgtgacgccggccaaagcagccgccgcgccgaccatcgcatagacgccgggctcaatcttgctcgtatggaagccgagcgacgagatgagcacgcccgtcttggccgactggaggtcctctgtcggttggaccagagcatgctaggaggtcagccgaagccatagcgcttcgcaaagaccgaaacgaagacagacggaggattagcccaacgatgcggccgaagcaggcgccaacggccagcgtcgggacgaagacgcctgcaacgaggggacgtcagtgctgccgttactgcaagacgaggttcagcgccaaggggacttaccagcaggtagcttgatgccgaaagtgacgatcgtcaagagtcccttgaggaccatcgcgaccgtgatcgcccagatggcagaccgaatctcgcttggcttcgagacgcacaggtgcgatggccgatctggcccgcactcggagaggaggagaaggacgagctcgccgccggccatgtgcgtcagagggttaacgaacgacaggacggcagtcacggaggtgacctgccataaggaagcgctgagggtcagaccgatgctgggacacctcttctgtcagtcgctgcactcaccagcgccacctccttgatcgggttcgtcttgagccaggttccgcctcggacatggcggctccagagcatgttgagtcggctgaagcaggcaccccagcacccctgtaacagagctcggcttctcatcagcactgaacccgtgagctgcagagcgccgtcgcactgaccatgcccactccgatgacgacaaagacgatgagctcggcgaagcgccagtcggtgtcgtaggacacttgaaagaggacaatctagaaagtgagggcggatcagctcgtgggtcgccgcgatgagattgagcgccaacgctgaccttgccggtgccgaatgggtccagcgccttgaggcaagtcacggcgacggtcgagcaccagaaggcgcgccagagcaccttgggtgggaagaagtaggagacttcctcgagcgagaagaggacgccgccgatgggctaggtgagcagggatacaaggttagcagcgttccggtcgccgtcaaacctggcccggcaggactcacagctccgaaggcgacggcgacacctgccgcgcaggccgcgctcaggatctcgcgccgcttgccctcgttcgtctcgtacttgagaacgaggcgcgagcagatgttgccgatgcagctcgcaatgtggaccatcgggccctccttgccgagcgaaaggccggcggcgactgacagcgttagaccgaccgacttggtaaagagcgtgcggccgccgaggtagccgtggatgacaaagccgctcagaatcgtcttgatctcggctgcaagcaggccgccaaaaggttagagggccgtttgtccgccatcctcctctcgaggcgactcacgaattccgcttccggcggcgaagaatatgaccttgcgcggccgcggctcgggctgatcagcggccccgccgtcgttcttggcctgcagtacgacgtcgcgccgcgtttcaaagtcggtcgaccgggtgaggctgacggtaaggtacgagctgagcgtagcgagtgcgacggcgaccagggtgtagacgacatattcgatctgctcgggacgtgatcggtcagcccgagcgcattatgctgtatcaggacgtacagacgtaccatgtagcgttcgagcgggatccagcgagcccacgagccctcgtctttcgattcgagcatcaggccgaaaaccgactcccaggtccgccagccctcgcaagcctctgcggtggcgagagccgccgcttgaccgggcgttgcaagagcggggaagaagaccaaagcggcgagcgagtgaggtccaagctcagggagggtgccctcgacgcccgagcagcctgcgaggtgaaacattgcggctgtcagcaatgagtcgcgtacgtcctcggcagccagtttggactcacagaatcccctgctcagccgccaccctccattgggcttggtacagtagccgtccttgagatcaaacaaccatccttcgcctgtgggcgtttcgtggggtcaaaagaagcacgagacgaaagcgaattggccggcagacgcacctcggacaatggcaaaggcaatgagagcggtgaaaattccgacggcggtgacgacgacccagccctgaaggcggtcccagagcaggaaggccttccagcgccagttgcggcgcgcgagattgcggatgttggccgagcgggaggcatctgtaggcgcaaagttgtgcgtcagcagtgagatgcgacgagcagaaggacctcggctgacccttgacaccgtcgtggacccagtcgaccgacgagaaggaggccgtccagtggcgtgtgccgttgctgacgacattgacgtcggtcgtgccggcgccgaggccctcatcgtacgactgggcgcgccggaggccgacgaacgaggccgttttagcgagctttttgcggaggcgttgagtgcctgggctccggagcgaggcgtacggcgagggcgagggcgactcctctcgggccgaacgagaagttgatagggagctgtaaacccctcggtggggctgctgcgcgtccaacaggaggccggtctggtcggtcgccttgcgacctcgtcgggcgtctgggtctggcgagagctcctcagagccgtcctgcgactgctgagggaagtatgtcgccgtcgttggcccgaacgtgaccgtcgatggctgacgactggttgaggaccggctggcgtcgagcccgcccgggccgccgtcgcccatggacgcttgggtgagctgcgagggcgaaggtgggccagacagatgagtcggccggtcgcggccatcgagctggtcgtccatcgaggccaaagaaggcgtccgagggcctccggcctgaaggtactcgtcgccgaggtccgagatggaggcaaaggaggcctgagagccggcgagagtgggcgagctgcgctgggcctgcttgccgagcgcgtctttcgacattcaggtccttgaaggaactggtgagggcgcgagaaggagttctggatgctctgtcacgagaggacggcgagaggacgagtttgatcagtgagaagcaagagggagggcaacaggcgcgggctgaggtggccggctgacaaggacgacggccgggcgcaccttgcgactcgtcgatgctcagccgtcgtctgctacaagctggcagcgaggagatagcagcctagaagatgggcggatctgtgaagggtctgtccttggagctatggaggagggtggcagacagcgatggagggtcggagagaggcaagcttgggttggcggcgggctgaaagaccggcgcgtcccgacagccggcgccgacggcggcacaaaggaagcgcttcccctcatgtcgctcgtaagtcaaagctctcgatgctggggctgaagggcaagtcttatcgacatgaaatggtgagactgcgccggatgcttccagcgacggagagcccaacatgagggcagccttggagagcgaccgaccggcctaggccccttcagccagcccgcacccagcggcatagcccgttgccgacctccggcacaacctccgacgacgaggtgcgaagagcgacgcgagactgagtttgcccagccatgtattcggcgttgctcggtgcgccgaacgggccggtcgaacacattttgagcgcttcgccgccggagttgcgatgcggccggtccgcctcgtcgtcgagagctgttggtgccgagcagtggcgacgtccagcagtgccgtacaaagaccggccgggcttgctccggaaagaagcgaatagggcgtttctcctccaagcctggctcgtgtcaagtgtcctggccggccgaggagtcgcccgaggacggcggttcgctcgcctcatcggcggatgaaccacagcccgacgaagagccagccgacaaggacgagaaagagcatgagccagcaccactggccgccgaccttgcgcgacatggtcgtcatgcgccgcatcgtccccttgatcgcggtcgaggtcgaagcgaagatgtcgttctgtcgcagtcgagaggagcaggatcagcgaggagtccccttagcgagcgtcgtcacccctgaagaccccaaagagaggaggcttggcattctcctctccgcaggtgtcgcaggcctaagcgcgcgcgggcgtcgccagctgactccgctgggagcgagctcggctggaccacagactgacggagctctcctctcgaccagagagcgagcagaatgagagaggaacgcaccatcgactcgagctcaaacgtcccatccttgacctcggacccgatgccgacggtgatgtccttgagcagccggaccttgccaatgaggccctcgagccgctcctcactttggccctcgagcgactcgagcgagcggtgggcaccgtagccgccaccacctccgacgggcgtctgcgagcgcgccgaaggggagaggtcgggcgcgtagggcgagccggagccggacgacgggtagagaagcgtgtggctgccgttgctggtgctgccgcccgggtaaagggcctgtgagcgcgggtagagcggcgcctgggccgtgcgcttcgacaggccggaagacgagaggctgcaaggggaagcaattcgactggatcagcgagggcgccaagaacggctgcggtcgagacgcactggctcatagctttggaacgacagctgggagggacgacgggtgcaggaggatgagagaaggagcggcgggcgaccaagaggagatgggcgaggcaaggcgtgggaacctggcgagccctgccgcgaggttccaatttcgacgcagcagcgcaacctcgtcgtcgggctcgccgggcccccttgcgagccgacaccctcttccctttacagttccttccttccagacctgccacgatgatcagaaccgcgtacgttccgcactgtcttgctgccgtgctggtctcagccggtatctcagagacctgcgacctgttcggacacgctgacagcctccctccctccctcgctctcctcccgttctctagcaagcccaagtctgcccgcgtcaagcgtgcgctcgaggagcgcgagcccaaggtcgtcgagaaccccaagacggccatctttgtccacggcaacaagacgggcgagcgcgttgcgatcgcgctcaaggagctcgtgcgtcaacgctgctcaagaggctgttgagttcaactgcggctgcctcagcgactgacaccttcgtcccatccgcctgcctctaggccatgctgaagcggcccgactcgatcccgttcaccaagaagaacgacgttcatcctttcgaggacgcggcctcgctcaacttctgggccgagaagaacgatgcgagcctcttctgcgtcggcctccactcgaagaagcggccgcacgacctcgtttttgcgcgcatgtttgccggccaggtgttcgacatggtcgaggtcggtgtcgagatggcgcagagcatgtccgagttcaaggtgcgtcctgcttcgaggcttggagctcagaggcgagagcttcggcggacggggagccttccttcgatttgtcgcccgcagctgaccacgtcctcccgccctgtccttctcctttcccccgatactctgcacctgcgcgcatccgtccgccccgcctcctgcttgcatccatcagacgcccaagtcgacgcccggccaccggccgctcatgcacttcgcctcgccgctcttcgagacgctgccggcgctcgtccagttcaagtcgatgctgctcgacttcttcaatggccacgagctcggcgaggtccacctcgccggtctcgagcacgtcatctcgatcacggccggcccgctccctgcccagccggctgcgtcgagctcgacctcgtcggccgtgcccgtcagcgaggccgccggtctcccgatcatccacttccggacgtcgacgatccggcttctccacagcgggacgcgcattcctcggatggagctcacgccgatgggccccaactttgacttcaagctccggcggcggcaggaggccgatagcgtcgtccttaaggaagcgatgcgccggccgaagctcgagaagaagagtgtcgagaagggcctcggcaagaagcgcaagaatgtcgagacggatgacatgggcgacaaggtcggcaagcttcacatcggcaagcaggacattgccaagctccaggtgcgcaagatgaagggcctccgcaagttcaagtcggaccgggtcgccgacgacggagccgcctccgaggggggcgagagcagcagcacacccgaccaccgatcggccaagaagagccggtcgtagctctttctgctcttgcttgtgctctctccttcatgacaataccctccacggcgtgctcgcattcgagacgggactgggagcgtcgtctgcgtgcaaagtaagccatcagccagcgcccctctgaggacatcccggcgacagagaatgcatgttccatacgagaaggcagcggatctacgagagagggagaggcaagcgtcgtgcgatgtgcggattgtgcgttgcagagagagagtaggggggacagtggggacgatgacgccgagtgggccgagggtgcgcgtggagagacaggaagcgatagagacctggagggacatgaggaggggccgaggcgcgaggcgaggacgtccccgctagtagtgaccgaggcgaggcgtaccggccgtcgaggttgacggctcggacggcgggccagatccgaagtcaagcgagacggcgtcgtagaggcctggcgtcggcgcgaggtaggctggcccctgaagcaagtgcgcctggccgctgtgactggccccgccggtcgtggaacagcttccgggcggcagagtcgtcggtgctgcggttccaggaccggcgttgccgccgctgccgagggaagccgagaacgaccagtcggcaaaggggttcggccccgaatcagcgaccggcagcgcaggctgagcagcgagcccggctggtccaccagcgaacgacgggatgtcgaggttgtagtatgcgttgccgtagccgagcgaattgccgccagcgctgccgcttccatggccgctgaatgtcggcggcgtcggtccagccgagacaaaggcgggcgacgagaagcgttggccgtcggcacttcccaatccgttgagtcccggcgtggaggtcgcgccggtaagcgggttatcgtcgtcgtcttcgtctgcggacgagccgtcgtcgtcgtcgtcgtcctccccacctgcgccgcccgtgctggcctgactggccatgctctcgcgccggcctcgaccagtcggaccagcgccatcctcatcatccgacgcgctgttcatcgccgcctcctggttttcgggcgcgccctctgcgctgctcttgcgccgcttgccagtcgcagccggggcggcaggcttgcgtttgcccttgcctgccgcacccttgccgcttttgctggcctcggcggccgcccgctcccgtcgctgccttcgccagagcttgcggaggtctcggaactctgtcgagcgcagggcagcggcgaacgacaatgagtcagcattaggccggcatcataggaggacggcagccagtcgtcgacgcacctgctgggaggcgcttcgggccatgattctggctgaggacatgcgcgttgagatggttgagggtgccgtaggccttgccgcactcctcaaagttgcagacgtagttgcgctcgacctcctcgaacttgcgccgcggccgctttggccgaccggtgacggcagagatctcacgctcggctggcgggccgctgtcgtcgtccggatccgagtcgccttccgccgccttgggtgcgggagccgcttttggcttcgatttgacgggcgccgtcgtgcgaggcacggccgcagagttggctcgcctccggccggctgcctgggcggcaggcgggagaggtggcggctggaggacagttggaggcgggtaaaagagacctgccgacaacgacggcggcgcaatcgatgaatgactgctgttgttggccggccgaccagccgctgccaacgctggctgcagctcgcgcggatcaaatgccggctgctgctgctgctgctgcctctgacgaatcgagccgggtgggtcgagcatcgacggcgcctgagcagcgtacgaggtcgaaggtcgactgctcactgcagcggctggcgcgcgattcgagttgtacatgcccaatggggcgtaggaggacggctggatgccggccgaggacccaaagacggcagcagcaggcacgccccaatctgcgccataaaactgtcggcggcacatgcagacataagaaggagacggagatgcgcgggaaatgtcagcactcattccagcaaccgaattagagggagcataggcgaggtactgacgctgaggggcacgccgtcgctcgtctgcggcctcagaccagcttgctgctggtagagctgggcaaagtcgccgccagcgccaccgtcgatcccgccgttccagccggcgagcgtcgccgctgttgacgcggcgctcatgctgctgtgcgctggccggctgtaggggtgcgccgcccgatgggcgatggaggacgaccggccgtgctgttgctgttgtgacggctcaccatagcccggaatgtacgcgagtccgctgccgctgctaacgccgttggtgaacgagcttccgggcccatgttggaggttctgctgttgctgatggagcggtcgccggtcgggcccgccttgcgaggtcggccggttgccttgctgcgagatggacgaccgccggccgccggtcggaggcgccgtgccgtactgaagcgcctgggcgggcgcctgatggtagttcggcgccgctcgctgctgctgctgctgttgctgcggcaggtacggactcgcgaacgcctgatcgctcccgccactcgagagtgactggagcgagaggttctccatcgcaaagctcgtccgcgacgtcgtgggcgggtaggctgccgccgccgcgtacgcgaactgctgcgggtcgtgctgagcgctcatcggccggccgcctggcgccaactgctggccagacgatgccgcgacggacgcgtgggacgaccctggccggccgtacgactggtcggggatggctgatggcgggaggtcggcgtacggtccgccgctgccgccctgggtgacgacctgctggagcatggcgtcggccgcaaagacgggcgagcccatcggctcgggcccgtggctcccattcgacggcgtcggatcgtgaggaccatcggccgagcccgactggctcatgaagacgagggcagaggccgcgttggccgtgtagggccttgcggcgatgagggacgccgtgctcggcggagggccagcctggccgccgccgccgccggcgttgaaagcagggtcgtacggcgtcgcgagacccgaggtagcgccccagatgtcgccaatgctgccagtcccaaaggcggaagcgacgaggtcgccaaagccattgctgctgctcccgttcgagggtcggaagccgccgacgccgccgccgccggccgagccgagccggctgtcggtcatcgaggccatgccgcccgagctcaggggaggactcgtgaagggcgcgtcctccctgacgggtggcaaggtagacgggccgcctccgctgatgccgaaggccgagggcgctgccaacccacgctcgccggggacgagcgggctcgggtagggtgacgctccggacgagaaggacgcggctgacgacgacgctgggccgccaacgagatgcgacgcatgctggaacacgtgctgctgctgctgctgctgccgctgctgctgctgctgttgctggctgccgtgaagttcagtcccgttgtgaccaaagtggtcgctgccattgacgatgccgccgctcgccgccgatagatggggcaggccgcgtccggcccgtggcggccaggcgaacgggtccatgcaaaggggcagaaagccaagctgcgagagaagggaggctgcgatccgagtggagagctggtagggttcgaagggtctcgtctaaggccggaagcttgatgggcgctcgtcgggtcgggccggccgagtgggaggaggttgaatagggcggcgttcgagctcgaggtcggcgttgcgagaggcagaggtgctgatgcgggcggggactgagtgctgacaccgccccggggagggctaagctgatgccgttcggagcgacaagtcgaggcggcgttccttcgaccgacgagagatgggtcggcgggcggaggagagggcagagcgaggcgtcgcgaccgagggcaaagagacgaaaagggatctccttgcgctcaaagggttgctaggctggtttgaggatcgccccctcggccgcgcgcttgccggaccggacgcacgcacgcatgcagcacaactgagcgggcgcaaccgagaagacgccaacagccgccggcaacccaccgaccgtcatcctctcttgcatgctgaccgctcaactgaatgacgcagaggtgggcagttggaacagggagcgaagcagacgagtggccggggcagagctgagctcctcggctgaaccgtcgcgcgcgaccaacgaccgacgatagcgagcgtacgtcggccgcaatacgccgaccttgtgcacccagcttgccatcctcgacaaggaacagaggatcgtctcgtagcgggcaaaccctagagggacaggaacagctcgtcatgcaggccatccgggccgaaatgaaggaagaattgccaagccgaccgcagcgcacgtcctgatgacgccccgctcggcggtgcctgcggctcgacgggatcgcggtacaggagcgcacgcacaggaatccagcagacctgccgttcggaccgttcggctagcgaagttcccgcttgatgggctgaagggccggccaccttgcgcacgacaggcctcggccgacgaggctggcagggcaggacagggcgacgatcgcaagcagcaggtcgggcaacctcttcttatccgacgtcgtgcgcaattccgtccccgccttgccacacatagctgtcgaccgggggcgtattgtcgaccgaagcctctgcctgctgagtcgccgtgaaggtcccgctctctcggcactgtcggcagaggcgagtcgggcgccgagaacctgaagccagcgtgggaacccttggccgcgctgacgtcggctcactcacgttgcggcgaagcaaaggacggctcccgcttcctccctcatgcccaccaccaaccaccttaccgtccttcaaccaacacaacctttcacgtcactcagccatgtcgcccctctctgtcttccttcacctcctgaccgtcccgctcgtggatccctctaaggccgagcccgcgccggtcgagctcgtcgagtcgccctcgggcacgccgcgctcgtcgctctcgctcgtccgtcccgctttctcccgtcctgacacttccccaccacccccactcactgctcgcaactgacctctcctctcttgtgattcgccagaacgacgcacaccgccgcctgaccgactttgacccggcctttggccacccggcgagctctgcctcgggttcgtcggcgctgtcgtcgtcgtcagcgggtgtcagctccaccggccggccgtggtgatgcgctttctgcggaccagcttccagccaacctctgtcggcctctacacatttcgacgatgcttcgcgagcctgtcaagacatccgagctgctcagtcattttcggccacactgcccaggccctcgctctcgcccagctagcgggcgcctacatttagctcgtgcgtcctctgaccgccacctgcctcttttcgatcaagcaactgacttctgatcctcctttgcctatcagcaagcaaccttacttaattcgactcctgccctagtccagcttcctccaaggcagcccgctgtatctcttagagcccctgtccgactgccgtctgcatcgcctcgatcgatgaccggcccactgtagcgttagcatacttgaatttcgttcttcccccagacggctttcagtcggtcgtcgggagatgggggcgagctagactatcatcgacggtcatcgcgcgcgaggtcgcctaaacgggaaaaaaggagaagacgcgagagaggaggatcgagccagcgagtccagaagggcgttagggcgtggggtgcgtaaggtcgtggcgagagagcgaaagttcaggaggaagagaaggcgaagaactggcagacaagacagacatcgacggtaggtccgtttagacgaggacgaagaggagtggcgcgagggcgagcatgccggtaagggcgccgacggtcgccgtcaatccacctggcagggcaagagaccagaggagatgtcagttacggcccatatcgaaagaaacagaacagcccacgcaccgccgctcgtctgcgccgtgcccgaagcagtctcgctcgatgctgccgggcccgagccagggatggccggcgtcggttctgcgcctgccggagccgaggccgaggcgtggccggcggcgccagagccaatggagtggtcgttgctgatttggtcgaacgagggcggggcgttgaacgaggcgagcgagaagccgtcgacgactggcaacgggacggccaaagtaaggagaagcttgttagcggtcgtttgtgctgactgagaagagagactcacgggccgaagggttggcggcgaagctcatgcgcgtccagagcatgttctcgatggccgcctgcagagaacgagggtcagatcaaaatcagcaggtcgcaagagaggtagtcaacgcggagacctaccatctttgcccagtcctccatcgccgggtcgacagccatctttgacccccacgcccacgcctcggtctggttgccgacctcggccttggccttggagaccattgcagcaacagcggtcgagttggccgccatgctctcaagccaggggtcgaaggccggggcggcggtggcgttggcgggtgccgcgggcggctggcgagcggacaggcagacatcagtggtctgggtgcctgccacataagaattatcgctacgcacgttgaggatcgagaacatgcccttggtgcagtgcggctggacgcctgtcgccacaagaaggagggcgcgtgccaacagagatcagctgagcttggccggctacccccgcgactcgagttaaggggccgcaccgcagaagacaaacgtcggctcggtactctggccgacgacgtgctcaaacgtcgcactcttgttgagccggccagacgtgaacggctcgacggtcgtggcgttgcagatgccgagcagcgacgactttgtcacctgcacgcgcgttgggcggccggcgagcgaggaaggtcagctgccgcgacggtagtaagcgagtgaagagtgggacggaccgtgtgtgggccggcgccccactgatacttaaccgtgtcgccgggcttgaccgtcaacgcgaacgggacgaagcggaggacgccctgcgacggtgcaacgatgacctagagacaggcgagcatcgcagacgagcgagaagaaagacagcggaagagaaggtcagtcgtgatggcgctcaaagcgagagcagatggagggacgaactgtgtgcgtctttgcgccgccctcgatgggctttgacgccccgccaacgccaggtgcgtgcgcttcgctggggctcggccagggggccggcgtcggggtcggagccgaaggaggcggccaaacgaacaaggctgagcagctggcgaggcaggcgtcgagcccctcgcctcctcctgcagcggcaggagtcgactcggccgacgcaggcggccagtacgtctcgctcgcggcctgccgaagggtcaaggttcaggatctgctgcgcttcaagtcgtgattgaggcaaggagagcacgcaccgaagcccagtcggtcgtgggcgtcggctcagcggcccaagatgttggcgtgtaggccgctccatcggcagccgacgaccactcggccggagcaggcgcgccatactcggcagcggtggcggccggcgcctcgtaagcctgcagccgggaatggcagaagggggtcgaggtcagctgcaggcggtcgctttgagctgagagagatgaacggaccggagcgtcgtacgtcggagaggggtcgtgcgcgcctccgtcagctccggccaagtgggcggcggcagcccaggcgtcgtcgttcggcgggtagtcagtctcacgctgggcgagctggtggccgttaagtcggccgggcgagtgggcgtgtgcggctgtggagagggagagaagagggcccaaggcggcgagggagggtgcgaggcgcatcttgtgggctgtgctaagacgggtaagagagacgaggctgaagcgtcgatgaagaagagaaggagcaaagaggcaaggagaaaccgtccggcggcaggtgaagcaggtgaagaaacgagagagaagcctgccggaggcgctctgaaaagaggagctggacgagggagagagggagaggcggaagggaggtgcgagggaggtgattagtcagctgagaggtcagacacgctagaacatactccggcggacgatgcaccttgcgagtgaagcgagtgtggatgggaaggaagggtagggaagcccggctggcggggttgaaagggaaggcaagaggaaggaaggaagaaggtcgacgtcaggcggaaggacgccggccgcctcttttcgcggcctttgagggagagcgagcaggaccacccgccacgtcgcgtccggagtcgaggcagaggtgcccgatcgagacgcgtcgtctgcaggggagagtgagcaggcacgccgctcctgtccagtcggcggccgggtaaaaggggtcgctctcggcctgtcgcatcggcgcgctaacgactggagggtagatggccccggagcggcattttccacgccgggcagactggatgctctgctgctgcttgccgttgttgctcgaggtgcggctggccatcctggcagatggcggttgcccggcggcgagagtcgtcgtgctgctgctgctgctgcgccgccgacgcgcgcgcgacgacgctgctgcagcagcgggctgacctccagagcctgctcgcgtccatcccaccggacgcgataggatcagctcggtctcatgctcctccctcgctccttgatcatcttggttatatgggagggagagggagaggccctgctactggccggagtctgaaccgcccgacggctgcgcggcttcgcccgtcgtcaccggcgtcgacgacctctctcttctcgactttcgaccgccatccgatccgacacctccttaatagcatgctcgccctcctgccaacgaccatcgctgcctggctggtcgccgccgctctcggtccggccctgctcggtccgtctacctctctcgttccgtcagctccggcttgccaagtcgggggcgagctgaccctctcccctctctcgttcctctcgaaccgaccttgccgctccgccgcagcttccgctcgcccctcgccgtcctcgccagctgtcagcagcaacgacctcttttccctcgtccggcgccaacaagcctccgcacctgcgccctgtgttttcgtgtgcacctccgtcagcaacgccctctcgtcctgcggcaactcgacgtgcctctgcaacaacggcgtcctcgactcgtttgtcgactgctcagagtgcacgctgcaggcgaccgagccggccaacctgaacgcgtcgatcgcgagctatcaggtgacgattgacggtcagtccgcctccgttttctcaatacgcgtggagtggctcgctgacagcccgtacctcaaccaccccgccgctcgccgttgcccgtcactctccttctctgcggcacatctgctctacgcttcacaaccctcgctcgaccgcctgccgcagccttccgctcctcgtgcagcacgtccggcatcacgctccccaacgtgaccgtctctgctcccgccgcgaacgtgacgtacccgaccggcccagccaacgcgactaactcgtcgtcgtcctcgctcgggccatccgcctcctcctctgccgcctcctcgtcgttttctgtggcgctttcgtcgtcctcggccgccgcctcgtcctcgtcagccgccgccagcgccggcgcgagccagtcggcctcggcctcctccgccgcgcctcccacctcgcagtcgaccgcgcccaactcggccggtacgatgacgtctgcccggctttcgaccgtcctgggtgcgctcggcgcgctcgcgctcgcttgtgcgctctaggatgccaccgccggctctccgggcaattgccctctttcggcctttacggcttggccgggcagattcatggactcttgcccggctttcctttgcttctgcttggagacgaaggtatgccaggctggtgcagagccattggagacgagcgagggtgatgttacatgacaacagggaggggacaaaaacagtaaacagacagcagcagacgaggggtggtacaagcaggagaacatctaggacgggaggaacaggaggagaaccacctcagtcaaagagcctcggtgtcgggccgcgcgagggcgatagcgatttgacgacggcgccgtcctcgtccatcggcgcgcagatgtagtcgaggtcaagcccgtggtcgttgtcgagcccgagcatcgtccggacgggcgtcggcggcgagccagcgtacggtgacggcgacagaccgccgttgccgttcggcgagagcggggcgtggctgctggcatggctgatcccgccgctcgcgccgaacgatggccgcttcgagttcgccggcgccgtctgaggccggaccgacccgcgcgagctcgagggcgagagcgtatggccaaacttgccggtaagggtccccggatggaggttgaggccgagcgagacgagcccgcgcttgatggctgctggcggcgggagcgtcggcgaaccgcccggcgacgacgacgactcgacgaaacggagcgtcgcaacgccgcagtcggcatccgagccgatgctcgaccctcgtcctccacagctgctgcccgcgtggtccttctcgtctatgtcgtccccggcgtccgacgtcgacgagttgctcgaccgagccgccgggctcaacgacccgcggtgcttatctgtcagaccatcgtccgccccgacggccgcctcgacgtcgttgtcgtcgtcagagtcgtttggccgcatgctcgaccgccggcgctgaaccgacgaaaagacggtcgtcgactcgccgccggtcgtcttgcgcgcggccgacgaatcttcgcccgagggcgacgtctgctcgccgctcccgcgcgtgcggtgggcgtatgactgggggttctggcgcagacgctcggcctcgagtggacggcagactacggcggggcacgaagggaaaggctatcagcgacgagccaagtgcacgcgagggtgaggcgccgagctcggacgcactagcaagcaaactcgtgatggcatagatcttgccgatcaggtcgttcgcgacgattgtgaacccgctcgagttagagacggtcccaaacgcgtacgccagcgcgatcgcgagctggtagacagtcaggaggaagccgttggcgacaaggatgcgtgacatggtctcgacgaccgacttggtcccctggaaggccgacttggagtggtgcagctcgtagatcatgacggcggcgatgatcgagtcaaggatctgcgagagttgtcgacgtcagcggccggatatacgtcgctgcgaaaggggctcgatacgaaccgaagccgagacgaggttgcagatcaacatcacgtggccgaccttgacgaggtcagggacgggtccgacgacgacgccctcgctgcgagaacagacagagccagggtcagtctaagtgacggtggtcggtcagtgagagcttacggacctcttgaacgacgcaaagatgatgacgatgcctgtcaggccaaacgcccagcagatgatcgtcgctgcccagagcgtccagcggaagatgagcatgtgcgtcgtgttccagacgcggagcgagctagtaaacgccaggcagcgatgggcgactgaaggagccatagattggaggcggtcagcccagctcgatggttgcgacagaggcgggagggtggagagagtcactcacgcaggacgtgggcgatgcccatcagccaggggttgcagatacgtgacgtgaggacggcgccgctcgtaaagatgtacgaaaagagcccgagctcatcggctagaattcgagagtggacaaaacgtcagtgccgatccgatgtgcgcgcagcgctctccgcggtcgagcaagagggagacgcaccgttgaggccgagcgagtgcatgcacgagaccatgttgcagacagtctggacgacgcagaagatgaggatgacgcggaccatacgctggatgatcgtccggtggttcgggaagttctggaagtaggccgatacttggtgctggtggatggtcggaggaggcgagggcgggccggcgtcagcataggcagccgagcctccgacggcgagccttggcacgagaggcgagagcgggccgacgcacgagaacaatacccatcaggagggcgtcaaagaggtagccaagcacgatgatgctcaggaagctgtcggccgacacgccgaccgagtaggcaacctccgcagcgtccatcgcgaagctcgagctggaggcgagattggtacgaggctttgaagccggagataggtgtcgcacggaaagcggccgactggaagacggctggccgagctaaagatgctcgcgagaaaaagggcgggaggcagtcggcggagccgaagcttgagggtgagggcgcggtaggtcgagctgcggtgcggttcctgcgagagctgaggaggagagcgagggcgagagcaggctagagagcttgaggagaggggggaggcagagaggaaggtcgacgtcgaaaggcagagtgcggccgagcccgtcgaaaggctttccgggcttatgctttggagtagaaaggaggaggatggcggttgacgagctgaggtctcgaagcgggccgactgacgagccaagcaacctggcagtgcaccagcctgccggctgaaccccgctgccggccttcttgccgagcggcgagagcagggcgagagccctccaggccgatggtcgccgggtgctgagcaggcaatccagctctccacgcttcattcgtgtcccaggacgatgggtagacgtgcttgcccgacgaggccgccgcgtgccaagcaggtggcgcgagtctcatcgcggcgcgctgagacctctctctcccggcctcgaccgttccccggcgggcggaggcggctcctgaaagaactggccgacgaagggcgctcgaactactggcaagcaaagctgctgatgagcaacatcagagaccatattcttaatgcttgccagcgggagcaggggcttgaccgacgaaagaagaagcagcgatggatgatggttgaagggaatgcacgcgatcaagagatagagaagcacgcgattgcgttagcggcgtaaacggcgtaagcgcatgtcgtgccgtcttgaggtcggctgggctgccctcctgccctcctcgtcaccagcaccatctcctccgacaacaaattcctccgccgacatgctcgcactcacccgctcatcaatcgcatcgcggcccttcggtgcgcgtgtcctgctttagcagctcagcgaggctgccgaccgactgactctgatccgacgacaggcgtcgcgcttcgcacccagttggcctcgcgaccgtacgcgacggccccgccgcccaagacggatggcccggcgccctacgtccctcctgccgcgaaagcaacggcatcgccccttgccagcacacccgatagcagcagcagcagcaatgcccgggcgcgcgcggccgggcgggcggggaccggcctcaaggcgacgctcgacgacatcaaggccgagaatgaccggaagtttgcctcgcttgggccggccgagaaggaggctcagatggcaaaggagaagcggggcgccctgatcaacatcggcctcatcactgccggagtgggcctgctcgcgtacagttacatcttcgtgcgtcagagtggtgtagatcaaggccattaaggccaaaggattgaccgtaccgcactctgccttcccttcggcagccgcctcctgtcgcatcgcctacgccgcactcaacggctgcggccgccgccggtatcccgctaaagccaaccgtcgtacgttctgcgaacgcctgatgctcgatcgcaaccagctgacgtcgaccgctcctcctctttcccgtagtaacttgagccgagcggtgatgttatgacgcttctggcgtccatgggtcaggtcaacacgtgaggggcgcagcaggcgatgtgggaatctgcaacgcgagccgccacgggtcgagatgagaagcggcctgaagggagtgaacaggctgtgtatcgccacctactcataccaccctgtgactcggctccgttgaggataggagcatggctgagtggcgaagcagcaaagagagcgcacctccttccggcgagcagcaggaagcgacgcccggccggccttcgccgcgccctctcaactacgacctcccttcattgcactttcctcgccctcgaccgccagcagcagcagtccttcctgtctgcacgcctgcagcccgcttgagtgcgagatggataccaagggtctcgaggacgacctcaagcagcgtatggtcgagcacggcgagtgggagcggtacgttcctagcccaccttgagctggtcggtcgtgctggacccggcggcgctcagctgacgacgtctcgcctcttctgcttcgctctatccgggtctgctgctttcaggatcctgcgcctgctgacggaccggctaggtgcctcgggttgggaagagacggtcaaggacaacgcagcgcgtacggcctggcgcagctcgtctctctctcgagcgcgcctctcggctgaccctcgttggtctcctgcctcatccgctcaaccgcaccacaggtcaagcccgcgcgatggagccgctgaacctggaaaagctgctggcggccatgtccccatcggcgcagggtgcgtgctgcttctgttgaggtcgccgtcgctcggggccgacgcgctgatcgcctgcactccgcctgccgcctgcagactctgtcccggccgacatccgcaaagaggtcgagggcctcatccgtgaatacctcgagcacaacatcgaatgacgatcccgaatctttctccaacgcactcatcaaattggcagcgcccagacgtggatgcctcgcgcactgctcgcgaccatccacttcgccccgccgggcgcgatcgtgaccgacgtcagctcctcctcctcctcgccgttgccgacatggtcgacgaccgagtagggctcctctggccagcggctgcgctttggcggcgcagcggatgcggaaaccggggctgacgagcggagagggtcaaagggcgcgtcagcggtagcaagaagggcctcgcacaagagatgggtacgcacagggtggcacgacaggccgaagcaggtgcggtttgatgtcaggcgcctcgtgctcgccttcgtcagacgacatgtcgacgtcgatgacttctggcggcccggacgccaccaccgctcgagccgctggtttcggcggggccgcggccagggcagcctcggcagcagcagcagcagccgcttcggccgccttctccttctccttcgtctcaatctcagacccagtccgccaagcgacagccggcactggccgcgtcttggccaccgtgtccgggttccagaggcaaacccgcccgccgcggatcgggagggcgacgagcgaggttgagacttcgctcccggcccggcctgggttgggtgaggcaaatgggaggacgtgcgcaaatgtcgcgaaccatgccggtcggagtggacgctcgagcggctccgagggcaggagcgggcgctcgcaatcaggcgactggtagacgtggaggacgtggtacgactctgcggccggcaaagcccacgcgtcagttgctgatcggtcgctgtgattcagcgcgagatgacgaagagtggaaatcgcactggctgtgttgctcgcgtactggctcgaggctgcctcgagaccgcccttgccgttgtgctcgccgtaccggagcgtcaccttgccggtcgtcttgtcgcggggaaagtgcctccggatgccgagccagcgccacttgacgagcttcgagccggcatcggccccttgtaggtgcggactgccgcacgcattctggaaagagagtatcgtgtcctcgccgtgcctgagagtggttggggtggcgggatgtcagccaagcgacttcgctggacccagctgtgcagctgcaaccgctgaacgcaccattcgacgccgttgatcggcccgtcatgcagaaagcgggtcgagaacagcggatggtacgagacgtaggtccgatggtcagaggcgcgctccttcggtgacggcaggcgtggcaggggccagattttcagcaagtagtcgagctgcacagggatgatcgacgtcagttgcgagcctggtcagcggatgttcgagcggtgagatgtacgcctccagtgacgagaaggggtaaggtcgggtgaaaatcctggttccgcagacgagatggtcaacgctatcgcaacttcagatgcagcagctcgtctcgcacgcaccacggctgtcacgccctcagtgtggccaccaggcgcctggcccgcgtagatcgcgacgacgactgagccttcattccctgtggcagtagccggcaccttgtacgcccctgggggtggctcagtgccgagcacattccagacgcgggcagtcgtatcgagtgaagtcgaggcgaggatctgggggcggcatcgagcgggagtcagagaagaaactccgcgggcggcctgcaggcagcccctcacgcagacgcacatgagggctcgagaggtggtacttgaggctgtagatctcctgcagaatccggtacagaatgaggagagcccatataggctgtaagatcaagcgagcttgacgcacctcgccgtgtccacgcaaaacgcggaggcgctcggcgccctggccgggctcgaggctcagccgccagacgtagatgaggcccttgcgaccagcaaacgtgatgagcggcatcagcctgatcggatcgtacgaccaggcgacgcagtggatgtcgtcctcgggctcgacgatctttagcacgaccttattgggctgctgcggcccgacccgaagcagcgtcacctacgggaaagatgtgagcttcagcaaacgggaaaggacagtagttctgagtacgcctggagcgcaccgagtccgaacagcaaattgcgacgacgtgggcgtactccttaacgatcgtcacccagcgctcctgccagggctcaagccggcgcgacgtgaccatgcccggggtgatatcgaacgaccggagcgtgtgctgcgaccagggcgagaagagcacctgcctgaactcgcgcggctggacgtcgtcctgcggggtcgacaggtggtaaggttacgagggtcagtcttgaccgacggcagcacggaggaggcgcgtcgttgctggtcccgcgacgcctgcctcgacgagggacgcacgagctcatcctcgacgatcgacttgcgcttccggccttcgacaacgacaggtgtcggtgctgccggcgggtaccacgcccccttggacgcgtagccgagcccaagcgggcctcgagcccggcgagtgatgccgtccttcgagtcgaccggctgcggcgtgcccgcgcgtccgagcgacgacgacccagagagcagcggcttgagcaggatcttccgcggcgcgccctccggcgggacctgattcgacactggcgcctgctcagcgaagggctgagtcatcgccgaacgggcgggcagagagagggagcggcgaaggagagtgcaaatgacggttcaaagggcaagcctcgccgacgcgacggagacgagcgggacaggaaccgcgcagcgctctcctgcgctctcctcctgtacttcgactctcgaccaatggcttcgcccaacttcccgcctgacctcgctatccggccgctccaagcagccgtcttcggcgcagaggacgaatgggcccagcagcaaggtatcgaacgccatggtatcgccggacgcgtctgggaggcctcgctcctgctcaaccgctacctccagcgaccgtcgaccgcctcggagggcttcgacccgccctgcccgctcttcaccggccggagcgatggcgaagatgatctcaggccaggtcggacggtgctcgagctcggcgccggtatcggccacgcctcttgcgagctcggcgccctcctctcgccggccgacctcatcctgatgacagacctgcctgaggtcgtcccgctcatggaggaccgccgggcgcgcttcctcgctcgtcggccgggagcgtccgctcgagccgaagtctgggtccggacgcttgcctggggcgaggacgacgagcgcgagattgcggacgagctcctgtcgaggcgcgagcgcagcggcaacgacagtccagcagtaccgctcgtcgatctggtgatcgcatccgacctcgtctacttcccaagtctgtcctgatcgtcgaaacagcgctttggagagtacactgacctcgcagctgcctgctcagatctctacccgccactcgtcgcgaccctcctagcgttgacggcctcgccgtttgaccccccgccagacatcgtcatcgcgtacaaggtgcgtcgtctagctccctccccggtgctctagtaaccgtcccctgagtctttctccctccccttccagtcgcgagacctctccaaggaggcaccattttgggatatgtgcgagcgtgctggtttcgcgctgacgcccgtcatcgatctctcgaccggccgttccctcggcgccgatggcggcgaccgcatgggcgtcttcctcatgcggcgaccagggttgcaggaggatccaaaggcggccggcgcacatacttcggaggaggcgcgatcggtgacattcgaggacctgctgttcctcggcatgggcgacctgtgcgactcggacgacgacggcaccgataatgatctggcgtgacgcgcatggcgttgtgcagtagaaggggtcattaagcatccaaagaggagcacgggtgtcgcagaggcaaggagtctagagggaccggaaccaggatacagtgagaggaaaggtgtgaaaggcgttgcgaagtgagacgctcagacggcggcggcagccggcgcggcagcctggtcgtttgacgagcttgagcgcttgctgtcgagcgccggacgctgaagcggcgcctgcacgcggtggccgatcttggtgccgtaccggacaagcgtctcgaggcttgcttgacagttgagccgaaggtcctcgtcccactcgaccttgccgttctccatcaagaggatgcacgtcgagccgccaaaggcaaagtaaccgagctcgtcgccacggcggacgagctcaccctcctggaccgagtggccgatggagccgaccactgagagggaaacgataacggtcagtcagccgggcggtcgcgagagcggagggcaggcgaccaagacgcactcattgctccaacgcagacgacaaagacgcggccaaagacgggcgagtcgatcggaacgaccgtccggacgttctcaccatagacgtcgagcgcggtccggatcgcctgggggttgactgggagggggggaaagagagatctagccggagggagtctcgaggactcgcaaagggccggacgtacccgtatagtaggcgccctcgaccttgagaatcttgccaatcttgccgtcgacggggacgtggaagcggtggtagtcctgcggcgcgagccggaagatctgcgatgaaagcgacagcggcgagaagggtcagcgatgagttggaaggcagcaggtagcgctgaatacgcaccccgacggcgccctcgctgaacttagccgcctcgccgccgtaggggccgaggagcttctcgatcgtaaagtcgcggcccttgatccagatcttggtcgcagacgagaccgtgtcgaacgccatgagccggcagtcggcgatcgagacgaccgcctccttgtctgggcagatcggccggacctcgggcttgagcttgcggtagaagaactgtgggagatagagacatcagcggcgaggccgcaaggagcagcatgtgctaggagacgacggacctcgttgaacgtccggaacgactcgagcgggttcaagacctcgtccatgttgagccggtggaatgcgatgaacgccggaatctcggcggccgactcgggcgagtcatacttgagaccctgcttgaccgacatcgacttgagcatgcgtcgcgctgaaaaggcgagggacagatgacgagtcaactgcaggctcactcggtcaggcgagaagcgtccggggacgcaccacgctggccctgcatctgtgacttggcgcccttgtagaggacccggatgccgagccggacgtagacggccatcttctcctcgagcaggtggccgctgatgcggtcctggacgaggatgttggccgagttggcgccgatccggtatgcaccggctgatgaagggatgaccagtcgagatcagcgagggcagtcaggacgacaaaggacagggcagtcgcttacacgagaccttggtgaagattttggtgagcgtcttgcgttgagcctgccgactgtaaggtggcgggaagccaagcggcaaccacagtcagccgatgtcatcctcgggaatgcagccctcaaggaaggacgcacgcggttacatagttgccgacgaggattcggttgatcgagttccagtcggcgctcgcgcagacggcgatgtgggtgacaatgtcgacctcggaccgcttgctgagccgaggccggtggcagagcgggcactctttgacattgatgacccgctcgaggtgctcgctctcctcggaaatctcgttctcctcgtcgtcatcgtacgggacgccggcctcatccgtcagaggcacctcgttcttgggcagaccgttgccgacgatggcaggccggtcgagctcggcgacggcagggtcctgcgcgggccgcgcagcagggccgtcgacgccgagtgcgacggcggggttcggccgcgaccgtccgtcgagcagctcgagagagggaattgcgtcagatgcctggaggctcggcgtaacagccccgctcccgctcgacagtatgtcattatcctcgggccggacgcggttcttgtcctccttgcgcttcttgacctcgccctcgagcgcctgaatgagctgctcgatcgtgagctcgtccgtctcgggactgaggttctgctgcgtaaagtagctgtcgatcgtctgcttggtaagcgtcgagccgagcgagtcgagcatctgttcaaacactgcgcgtcagtctgctgtcgcctcagagaatatgacgcgtcgacgccaaacgcacggtctcgagctcggtgagcgagatgcggccggatccgtcctcgtcgtactgcttggcgagctcgcgccaaaactgcaaggcaaggatgagctgcgcgtcagctgctgcacgaccctaaaggcgaaggctgaagaggctcacgcgctggcgcagcgcctcgtatggctcgtacttggcgcggatagtgatgaacgggttgtgcttgttctgccacgatgggtcctgtggcgtctcgaggtgcagctggcggcagggggtaggggcagctgtgtcagcagctcgtcgagctgcaacgctcaatcggcacccgagcgcaccttgaagtccttcatgtcgccccggccgtccgactcgtgcaggcccgtctgcgggttcggccgcggggcagcgttgagcaactcggcgagcggcagactgacaaataggggtcagttcggtcgtcgaagccgacaggcgccagcccaaggcgacttacgacgtctcgccgacatagtcgttgccgctcgccttgtcccagtcgaggatggagaacttgatagtgtacgagctggaaggagagcacagaggtcagtttcagtctcaagtgggtgcgcgatgctacagagaaggagacggccgaacctttcgaacttcttgcagtggaagaggagcttctcgtcccactgggggttgagctcatgccggatgacgcgcgtccggaagattttcttgccgaagctgacgacgacgaaggggtccatgtcgaagctgggggtgggagcgggttcccagtcagtcgctcgcgcgcactcccagagcagtttcgagacgcacccaatcttgaaggcgtttttcagccgcgggagatcctctgcgcccttgatctcgagcatgacgacgccaaggatctccgagtcggtcgagtagctgaagtccttgttcgatttcttgctccgccggaacttgcgccgccgccggcccggctctgacgacgaggcgccgtccccgcctgagaggtcaaagtagctgtcaccactgcccttgcgcgtcggcctcgcgagcgcgggcgtcgaaccccggcgaggggtcgatagcgagccgctcgatgacgagggctcgttcagcgtcgtcgtcgacgacgccgacgttactgccgggacaccaagcgccgctgagccgagcgcaggcaggaggagtccgttggccgacgtccgagggacgttcgacgaggacggcagctcgcgcagcttgttgcgcggcgactggggcgcgctcgggggtgcgctcgcaggcgagtcattgccgtcgtcctcgtccgagctcgtgtcgctcgacaggccgtcgtcctggagttcgcccgcgctactcgccgagtcgtcgctgtcatcgtcgtcgacggtgcgccccttggtcgtgccaatgcccttgtaggccggaaccgtcaggatgttgcgctcttcggatcgcttgagcaggtagccgtaggccgttcggaagtcgaccgtcggcgccgccgactcgccgctcgacacgaagccgatgcggagcttgatgtgcccggttgcctttttgcgccgacgtgatgacacgaggggcgccgtgacaggctgcaggggaaggtgcaaaaagaagtcagtcgagagtcgacgacgcccttcgaaccggaagcacacgcgtaccttgacttccgggctccactcaatcggctcactgttgggaaaccagtcggcgacctggacggctgcctcgccgaggtactctttccgcagcatgtcctgtaagcgcgggcgggagagtcagcacgtcgacactcggccagcgcaggagagatcagccgacgcaccttgtcccacacaacgcactcgatcgcgccgagcaggccggcctggccgcggaagagcgggaagtcaaaggtcgagctcgcggccgggaactctggctcgagcgagcgcttgacgaccttggtcgaatgccggttcggagggacgttgaccgtgacgaagctggcgttggggggggggggcgtgtgcgcgtgtcagcactagcgccggccgctgccgcagctcgagccgagagggagggctgaatcgggactgacgggtcagaggtcgttccgcctcggtcatgggcgatgaggcccgagccactgattacctggacgcggaggatggcagctggttgctccttctctgcgagcggacgtcgaatcaaaaagggcaggtcaaggtgttagcaacaggcggatcgtgcggccggagccacagccggccagcttgaagccctcctctctcgagagagcgcgccagacggaccttcggtagcgtttttggatccggcgcttcgcctgatcgggttcttgagtctcagcggcttgacgaggcgctgcaggcacgatgcgatgagaggcgggtcgtcagcttcagccctcgtcggagggagcgagcctgcggtgacagctgcagtcagaggacggaccttgcgccgggaggccttttccggtgcctgcacatcgacagtttgatggtctgctgctacgctcatgcttgatgggggaatactggcagataggatgatggtgggaggagagaggcgagggatggaccggcatgggcttgcggttcagccttgcggccgcgcagccgcccgctgctgagactgacgctgttgccggcggccgacggtgcgttgccggccgggcgaccgtcacctctctttcagcagccctcttgcacagccagcaccgacgacactactgccagccgggccaaacggaggataattgtcgggcatctctcgcaagtccttggtagacgggctggcctccgcgccctaggcggcagccgatcgggacggcagcgactcccctctctcgagcctcgttatccgttgtcatcgccatcttcaagccagtccgaggaggcgtgagatctctgcgtccccctcgagccggaccgtctgccactctgggtggatcttggcctggatgctcttctcgtagaagtcgatcgcctgccaggaaggagacaggtcgagtcgatcaacatgtgcgcgctgagagtagaggtgaggtcatgacgcaccgactggttccagtcgaggacgctccagccgctggacgaacgaggggcgagtcagcgtcgatagcggcgggggccgaggagacagggacgcacaccctgccgcattccttctcgagcgcgattttgccgagctcgcggaagagggccttgccgacgccggtgccgcgcgtcgatggcgtcacgtacaggtcctcgaggtaaaggccgttcttggcttgccaggtgctgtagctgaagaagtagagcgcgaggccgacgacggcgccgccctccttggcctcctgcgcgacgagggcgtaggcgacgcgaaggccgccctcagccgggaaaagcgtcttgagtaggagatcttcggtcgcctcgacctgattgagcgacttctcgtagtcggcctgcgggtcgcggtcgagggcggcgagggccgtcagccatcacgtacgggtcggtcgtcggccggcccgccgatgacgggcgaagccgaagcaggcagctcggctctcgacaggcagaggccgagcataagaggacgtacgagctccttgatcaggcgcagaatgtcgccctgcgagatgaagcgccggagcgacagggcccatgattgacgcagggtgggagacggtcgcggtgagaggaagatgagtaaggagcaggcgtcgaggtcagccctccgaggccggtcccgagcaacaaaccgagagctcctggacgcacgacatcggcttcggtcgccggccggacctggtactgggaagtgctcatgacgagaaacagagagagtgtttgcgaggaagatggctgtcggcagtcagcgcgatggcgcaggcttctcgagcggggacgagggctgagccgcgcagcagcagccccgacgtcgagtcaggccggcgttgcttcccgctgacctcagccagccctaagtccccggtcaagctgttcatggccgccagaaggtgcggtaaatagaatctacctgatcatgtcatcttcagacatatcaatggagatgcgagacgcgtcatgggtcgtgcgggcttggcgcccgcacagctgcgagggttcttagactgatggagggaaggagggaatgcatccgcctcgggtacgacatgcagcgactcggatggcgaggagactcgtagaataggtttgcgcgccctacatgacgacgcacccccgcccacagcaaccgctcttcccgacctcgcccccagcgccgttgtcttctgcgagcctctcgcgccgtcggcggctcgcccggcgcttcttctcagccgtcgccgcgagcttggtctcgtgctcttcggcctcgataaccgggttcgaaacttgggggtggtacgaggccgagtcgcggaccttgctcatccggctgttggtgcgacgggggggtcagcccatctggatcaaaagggatgcggggctgagcgtgggacgaggacgcaccgatggccgttggccgagccgtcaaagacactgctcgacggcgccgggctgtgcatgtctgatgaccgcgccgtcgcctctgttgccggcgccggccgaggacgggcaaacgagtcccacccgtcgtccgtgctcgctcctcctccagccggcgcgttggccggatctggccgttcctcgtcctcgagcgggcggcgcgatgcgtctgccagagcgggcggcggcggcggctgagcggtcgaagcgagcgcggtagtcgtccgcgagcgagggggcctgtagccaaacgtcccgggcgcaggtggcggccagtcatcgtcgtcgtcgtcctcctcctgctctcgcctcgcactgcggtcatcggccgagcgattactctcgccgagcggcagctcatcgaccggcagtcgctcgccctcagcgccgctgccgccgtccttcgaaggcgacgccgccgtgtagggctcgcgagtccggccggcggcggcggccagcttgctcggcggcgtcgacgacggattcgaaatcgagtcgtcccactcgagcagcgggttgtgcttcttcttcttcttgacggctggcggaatcggaggggtcggcgtcagatgcagggttgctaaggaggaagcgcgagcggtagcacttacttggcaagacgaccgcatcccagttcatgagttcgtcgcgcgttggcttgccggccgcgttcggcgggaccgcgtcctcgccgtagaggctcagccggacggatgacgtctcgtccaggtcctgtccgtcaggaccggcagcggccgacgtcgcggactggttagggtcaaacgccgaaggcggcccagcctccgctgttgtcgtcgacgacgtcatcgcaaccgtcgacgttgcctgaagcgacgcccgtcgaccatgaacaaagctggtcgacccgccgcttgcacgaccggctccgctagccaccggcgtcggcgagacgacgctcggccgccggctgctcgtgctcccgttcagactgccgacgatcggccggtcgctgccagaagaccgtcgcgtgcctgccggcgctgcgaggacagtctgcggggatggcatggacctatccgccgccaaggacgccgccgccgatggagtgggcccgactgctgccgtccgaccaggcgaggtcgagcccgcacggctgctcccggtagccggtgcagcagccagcgccgggccagagacgctccgccgagcgctgctgctgccgagggcgccgccggtgctgagcgctcgctgacgctgagcaccttcctcgcgccggcgccggcgggcctcttgctcgtcaacagtggcagcagtgccggtggctggaagtgtgccctgaaaagggctgacggacgtccggccgagtgttggaccaagcgtcaacaacgggttgtctgttgggccgctgccgccggaagcagcgaccgtgctgaggttacctaacgtcgtcgacccgacgattccccttgcgacccccatccccgtcatcactggcatcgacccctccaccccggccgacgccagcgacggcacctcctcggcccccggcgttaaatgctcgtcgagctcccacccatgccttgcgatcgcaagcagctcgcggcgccgctcgagccgcttgcgctcgtcctcgacgcgcgagagggcgaggagccgctcggcttcggcggaccagacgggcgagccagggacgatggcctcggaggcggcggcggcggtggcggctgatgctgtaggtttccgcgagggggtttcgctccgcgtcgagctttggctggcggctgcggcaagtcgagcgtcggtcgtctgcctcatcgacagcggcgaggcgcctcggttgtcgtgctcagagccgtccctctcggccctctccatcaccggcggcgacgactcctcctcgaacgcgctcgacgccgacgcccgcccctcctgccgccacacatccggcatctgccttcttagctcgcgctccgtaaagccatcgcccgcgccgagctcgacgcgcccgtctggccggagcgagagcaggtcgcgcgagaggatctggaagggcgcgacttcgtcggtgatgagtcggtcggagggggaggggcggctcatccctccgcgcgacctcgagcgcaacctcgtcccttcccgcccctgaccgagttcacgcactccgatcccgccggccgcgcactcgcctcggccaacccgcgctcgatcttcgaggcgccaggcgtcagctcgagcgacgtcacgcccgtcacgggccggatctacgatggcatccggctcgacgagcttgacgggccgggaagggacgaggttgcgctcgaggtcgcgcggaggggcgtcgtcgcgttccgtggccaacagtttaccgagcaggggccagagtggtacaagcagtggggatcggtgcgtctttctccattccttgccaagtcgactcgaccgtcacttgccttgctgatcgaggcctatttcggttcttcgccagcacttcggccgtctccacacgcacccgacgagtcttagccctgagggccacccggaaatccacctcgtctaccgcgaagggaccacgaggtccgtcctttgccacgaccctgaccggcctcggtcgcctttgctaactttcccctctctctgcagcttcaactatgaggcttccgacagctacaataccctgtcgtggcactgtgcgttcacttggctgttgcttcacgtctctctcgactccaggcttgctggctacgttctaacccgttgcccttctgcagccgacgtctcctacgagctgcagccgcctggcctcacatcgctgtttctgatcgagttccgtgagtggccccccttatcttgcatcttctttcttcgccgcttgctgataggcctctgctccttcctgcttgccctccagccgagagcggcggcgacacactctacgccgacatgcgcgaggcctaccggcgcctttccaagccgatgcaggacttcctcgagggcctcgaggccattcactccggcgtcgcccaggccaactactcgctttccggcggacgaggcggcatcgtccgtcgagcgccggtcgagcatgcccacccgctcgtccgcacccacccggtgacgggcgacaagtcgctctacgtcaacgagcagtttgtcacgcgcatcgtcggcctccggaaggaggagagcgtggcgatcctcaagctcctcaacgaccatgtcgctcgcggcgcggacttccatgcgcgactcaaatgggagaccgacatggtcatcgtgcgtccgaggcgggcccgtcatcccgtttcgccgcagctgaccctccttcctccattcttctcagctctgggacaaccgtgtgatgaaccacacagctctcgtcgacttcaaggacagcggggcgactcgcttcggctgccgtgttacccctcaggccgagcgcccgagcgccgggccgccgacttccgcatagggcgccgaatcgcccgtctcgtcttcgttcgtcttccctttgtatcgcgctctgtgagcggccagtctttttgtatccatcgtccccgttctccgtggccaactcgcagcaagcgccagaaggcagtggacccgagatgcgtacagggccggagaggctcgcgcgcgcagccctccctctctgccagcgcttctcggcttcctcaccttcctctttcaccaccatcccgaaaatgacctccttgaacgtccccagctcgcatgcagccgttgtagatctcctcgccgaggcgcgagcgatgatggcgcgagcgacagcgtcggcagcgggcgttgctcaggctgggcttccctcggcaggagcggacgaccaatcggagggaaggccgtcgagctcttcgcctcgcacagcgccgccgaagactggtcgacggcggtccgcctctcccccgacgcagcctgccaagagaagccgtaacagatcgccttcgagcagcagtagcgcgccggttggcatcgagggcggtgacagaggcgaccattgggacccctggggcttcggtgcctcacttgttgaccgcttcccggccctcgcgcaacgctccttcttctgcatccagtggtgcgagccgctctctctctctctctcatttgcagcctactcgagctgactggttgctaccgaggctcgcaggcaccaggcgacagctcttcacgtccgtcccctccccccgctgccgctcgcagaaatgagcaagggccgaccggcgctgactggcttctccatctgagcagtacgacctccggctacaatgcgctttcgcctcggacgccgggccgagcggaatcgtcggcgcactcgatggaccgcagaacgccggcacgttgtcgtttgcgattccgcttggcgcgtgggacacccggccgggtgagatgcggctagcgtgcgtcccttgtaccgactgtagctcggctggggaagaatgtcgctgataatctgccgatggggcattcagggtcgagacgaacatccactcaattgcgtacacagtttttgagggctcgcagtcggatccgggccgatcgtcgagggccgtcagcacaatgccgcgaggcagtacgtcgaccatctgtcccttgtctctggctttacattctgacgtcgacatttctgttgattcagccctactatgggagatcggctcgtacacaatcgctggtccgcccgagcccgagggccgacacgactcgtccggcggcgaggaggaggacgaggttgccgccgttgacgctgagaacgcagcttacgctcaggagcgactactcctcgaaggcgttcggaagggcaagtttaccgtcacgctgcatggtgcttcctcttcgtccgtcatgtcttgagcttccgcgactgacgctgcctcctggcgactgacgagcaaggccactgcaagctgcactcgctcacgcttaaattccggcggaaagccatcaagactgacggccgcggccggccaaaggtcgaatggtcggtcatccgtgcgagcggcaagcagctcgtgcgcggacccgaggactcagactggcatcgaagcatcttgactgaccgaacgctgcgcgaggttggcgagggtgcacagacggtagacggcgcgcagtagctagcttgcgaggagtgaaggatgagatgcaggacatgacaacacatgatgatcgcaagggtgtgtagaggctacaatgggtgcgggtatgggagaggagcagagcgcggggcggcgagaggatgtctactgcgcgacgcgcgaggtaccgtcgttggcgtcgacggcggcctcgacagcctggtcggctttcttctcctgggcggcgtagtcgacctcgttgccacgggtcgagtcgccctcgatgacgttgtcttgcgagatgccgtcgagctaaagggcgcgacaagagcgaagggtcagcaacagtcgacaccgatgaagagaggtgggcgcagcaacgcacctcctggccaccaaccgagccgacgggctccgacttgcggacgtcaacctcgttgtcggggttgtagtcggcaccactgcagagagacgggaggcgagcagcaaggtcagcgatgagagagttgagcggcagggcaagctgaacaggacgcacccctcgttgacgacggggtcagagtcgggggcgggctgcttcgagtcgcggagagtggctctggaggcgcgggatgggaagatcgatcgaggtcagcaagggcgaggggggatggccggcaagcaggcggcagacgacgcacccctcagacatgattggagatgaggatcggggttaaggtaggggtaggaagagggaagggaaagagggtgttgagcgagatgggtgttggatgaatacaagacgatggctcgccgccgccccctcttgtagtcttggcctgcctccggtttcaacgtcatccttcccgtcttgccatcgcgtcctgggctggcgatggtcgcacaacagcccgatgctccaacgcttcggaagcggcttccgctcaaaaattattaaaggggctcggtcgcgctctcaacctacaacgaaggcacatcgagatggaaagcaagagagaaagaaggtcgcccgagcccaggcgatttacaagagggggaagcactacttcatcgttggcatcgccgtcgtcgccttgttgtcgagcgcatcctcggcccgccagaaggacgtcgtcgtctgagggcgagctcagagccggtcagcgcccgaactagcagacgaaatggagtgttgcagggcgctcaccctgagctgcgtccagaagtcgatgccgcgcgggccgtacaggctgtgaccgccgaggacgctgcccttgttgcccgaccacgaaaacatcggcagcgggacgctgagagggagccgagaagcagggggtcagaatccgagctgtcggacgactaggttacacgcgactcacgggatgggaacactgtagttgagcagaatggggggtcaggagagacagatcagcttgtaaaactacacacagtagaccagagagcacgcacttgatgccgatctggccggcctcgacgccgcgctcaaacttgcgggcggtcgcgcccgactgggtgaagatggccgtgccgttgccgtctgatggaaaaggttcagccaaccgggcgggacagcgatcgcgcaagagggacgcacagtggttgcggttgatgagcgcgatggcgtcgtcgagcgagtccgacttgacaatgacgaggaccgggccaaagatctcctccttgtagcagtccatctcggtcgtcgcctcgaggatggtcgggccgacaaaattgccgttgtcgtagccggcgactgaacggttgcggccgtcgagcaggatccggccgccttggtcctcgcacgactggatgaggcgctcaaccttctcccgggcggcgggcgtgatgagcgggccgctgcggcgagaaagtgatctcatcagccgcctgccaaacgcgaagtcaccccgacgcgcgcacaactcacacctcggtctctgggtcaaagccgttgccgaccttgaggacctttgcgcgctcgacgaggccatcgacccagttctgcgactcgcccacggtgacgagcgtcgaaagggccatgcagcgctggccggccgcgccaaacgcgccaccgacgatagagttgagcgcaaagttctcgttggcgtccggcatcaggatcgcatggttcttggcaccaaggttggcctggacgcgcttgccgtgcttcgagcccgtctcgtagatgtactcgccagccttgttgccgccgacaaaggtgatggccttgatgcgcggctccttgcagatgaactggacgggagggatcgtgccgttgatgaccgagacgacgcccttgggcgcgccggcctgctggaggagctcgacgaggatcgcgctcgcgcccgggtcgcgctcagacggcttcagcaggagcgtattgccagtcgcgacggccatcgcgagcgaccagagcggaatcatggcgggaaagttgaagctgcaggcaaagcgacaggagggtgtcagcgcgcgcagcaagacctcagtgacggacggataaagagaagcagagactcacgggcagatggcagccgtcacaccgagcggtgctcgacgggtccaggtgtccatgtccttggagacctcgagatggtcaccaagcaggaggctcgggatgccgcacgccgtttcgacgacctgaaggccgcgcaggacgtcgcctttggcgtcggcaaaggtcttgccctgctcgagcacgatggaacgcgccagctcgtcatggtgctcgcggataagggcctggaacctggcaagacaagtgaagagcgagcggtcggcgaaatggggatcagtcggctgaccctcagggagagcagctcgcgcgcgcgcgcagctccgccaagctccggtcacaatgtgcgccgacgacaagcagctctgccttacgaagacggacgcacttgagcatgacggcctggcggcggagcgggctcgaatctttccactcgtcaaaggcctcctcggccttgtcgaccgcacggaccatgtcggccagcggcgtctcgggcacgcgcgacagcagcgcctggctcgacgggtcgtggatgtcgagccacttgtcggccgtgccggccgtccactcgccgccgataaggttgagggaccggccgccatcgacggtcgtcccgccccacttgtggaggagcgtccggtccgaggcctgggtcgccagggcgcgcgaagccgaccgggcggcggaagcgtgcaggcgggcccgggtgcgaaggctagccgagagcatcgtcggcgagggcagtaggacgggaagaaaacggcgaggtcgtgtgaagaggaggagcagatgctagaggggtagcttgaaagactagagagagtgagggcaggaggcgagccagagatgggcaggaagcaaggtcagccgcaggagcgtcgggcgagtgcgactccggcccggtagcgaagcgccgcgagctgggcgccgtgtggcaggagccagcttcctctcgactcacacgttgctgatcggggcgggcacaggcgggcgggatgaggaggagagggtcgtcgttgctggtctgccgaacgtctgcctgctctgcttcgaaagaagaaagacggcctgacccgccgttcgcgagagctcggctcgctcggcacgcgttccgggggaggggggggcgatttccacagcggctgcgcggcgcccggccagcaagcgtccggcgacgagcgacagacagctagcgctaaaccgcctggctggcctcgggtcgtgcaaatctcgagagcaaggagacatcgtagacaggaaagcggccctaattgagcatcgcccagcgcttggcccgaccctcgtctcgccagtcagccttttcctctccgtcgccgtcgccgccgccgccgagggccgggcccgtcgcgacgctcttcatcccgagcccacgcctgccctcgcctgcgctccgagtgacctcgaccggcttgacgcgccctggaccgtcagtactgccagagccgagggcttggccgggcgtccagccgtgcttgaggaggagcgagtggccgacgttggttgcggggaggggcgtcgaggcgtcctgcgctggcgtagcggcaagagctcgcggagcaggcgacgaggcagttgctcgggcggcagcgacggcgacggctgttgcgtgcgaataggacgggtggaccgcccgtcgtgccgccgcgcggtccacatacgccggctgctgtggcgcgtcgtcctcgtcctgggctggccctccctcagcttctagcgggcgcttgagaggccgccgaggcgccggcgcggccgcttgcgactttgacttgagcatgtcctgccgcaggcgctggatgcgctccttcgagctgagcccggcaaatggatcgtgaagggctggtggcgcctttgctgagggggagagcgacccgtccctggccgctgaggggtgaatcgaggtcgagatgagggccgaggcggacgagagcgagcacgcgccgcagggcagcgagggatggaggtgaacctgcaacggctgacggttagccctttatgtcaaagctaaatgcgggacgcgacgcacctcaaagcgcgagctgccgatcttgacgacgtcgccgtgcgcaagcgtccgagggagactcgcaacttttgccgcgctcaggcgctcgcccttgctcttgcccgcatcagaagcgccgtgcgccttgatgaaggtcccgtgggtcgagccgaggtcgacaatcgcccacgaccctcgaggcttctccttgggcttgggcttgggtttagtgggcgcggcggggagcgggtcggcggcgtcgcggtcgaggtaggccgagccccagccgccgtcgtcctcctcggccgctggtctagagggcgctgcttctggcggctcataaaatatgatcgcatgcgtcttgctgtgtgacccagaaatcagcgggtcagcgacggacgagagtcgcacacggcaggcagcgcgcacgcacgcacctgacttccatctcgcgcagccggatccggccctcctccgagccgatctgccgatctctgcctattgagtagccgtcgggctggtaggacgacagcgtcgccagcttctgttcctcaggcaggcacgccgaccggaggcagacaagccggaggaactcttgacggaaggtggtcgctggtcgggtggccggcgcagcgagctcgtcgtcggccgcagggaaggcgaactgccgagggtcgttgtactgctcggccgccactggtagctcgtcgtccgatagctcgccctcctccttgtcgcctccgctagcagcagcagcagccgttgtcgtctggtcggttgagggcaggtagcggtacgcgcccgtctcggcgcagtactgggcccaggcattcaggccggggttgtagtagaggttgtactcggcgcgccaaatccaggtcgaggccgagggcgtgctagcctcagaccggattgcgctggccatcctggcctgtgagaggaaggaggcgatggtggtcgagagagagggagacagcctaccccgtcgtcgtcgtcgtcgtcgtcgtcgccggcgtcgatcgcctcaagccttctttttttccttgcggacccgcctgcaaggacgagcagcacgctggctgccttcgcaacggggagggagactgggcaaacgactctcgctcctccccttccacctcaacccatctctctctgaaaaatgtccaccgaacaggtccagctcaagtccaagtcgcccaaggagtccgaggtcaaggccgaggagggcctctcgaacgacgtgtgcgtctccctccgaggccggcggcgagagagcttctgctccgccgccccggacctgtcgctctgcttgggctgaccttagtcgtccgacctcacttgcgcccgcttccgctttcctctctgctgcactttgtcatcgccgctctgctagcgtcaccaagtaccagactgcgtcgaccattgtcggcaaggtcctcgagcaactcgtccctcagatcgaggctggcaagacgctcgtcgagctctgcacgaccggcgacaagctcattgacgagctcgtcgcgaccgtctacaacaagaagggcctcaagatcaccaagggcatcgccttcccgaccgccatctcggttaacaacgccgtctcgcacgtctcgcccctcgctaacgacgagtcgtttgccgccctcgccgacggcgacgtcgtcaaggtccagctcggtgtccacatcgacggcgtcagtccagccgctctcatgagatcaggggcggagatgggagagaaagaggcggcaagggtgtcgctgggtctaggagggaagctgcctcggctgagaggacgggtgtcgcgtcggggcgatcacttttctgacagaacgcgaggactgaccctctgctgctctttgccctgcagtacgcctcgattcacgccgagacgatcattgtcggtgcctcggcctccaagccggctgaggagcgcaaggccgacgttgtcgaggccgcctaccaggccgctcaggctgctgtgcgtcgtctcctctcgtcaagcgcgatgcccagatcgcgctctacaagaggctgacccagagcacgtcttttcgtctcgccgccatcagatgcgcctcctcaaggagggtggcaagggctacgacgtcaccgagggtgtcggaaaggtcgctaaggagttcgagtgcaccccggtcgagggtcagctgtcgtgcaacgtacgtttgccgcgcttagcccaaacttctcgttatgatgttgaccttcgcctcgcctttcgttactcgcagcacctgcaattcacccccgatggcccgaagcgcatcatcctcaacccctcggctgacaccaagcactctgagaacaacccgacgttcgcccagggcgaggtctacggtgttgacgtcctgattgcgacctcggccgacggcaaggcccggcccgaggaggccaagacgaccatcttcaagaaggccgacattacgtaccagctcaagctcaagacgtcgcgcacgacgtttgccgagatccagaagaaggccggcgccttcccgttcacgctccgctgcctcgacgacgccaagcgggcgcggatgggcgtccaggaggcggtccagcacggcctcctccggccctacgaggttgtcaacaccgagaagggctcgtacgtcgcccagttcttcttcactatcgccctcctcccagccggcccgctcctcctctcgccgacgccggcctggtacggcgccgacaaggtcaagagcaccaagtctgtccaggacgaggagctcaagagcctgattgccgccaagctgcgtgtcgacaagaagaaggcgaagaaggcggccaaggccgagggcgagggcgaggccaagaaggagtagagccaggcgcgctgccatcgagcctgaaacatcgaaagcattccaacttgacatcagggccagcgatggaaaggtcggtcgaggctgcgggcgggtgcgaacaaggatcgctcgcagcggacgagatcgtcaaacagtagtacaagcatgatgagacgcaggccgcccgcccacctcccgggtccgaggctgcctccccttcgacgaccgagcaatctccctcagccggttgaataccctcagccggttgaacactcagcggcggggcgaaggcgaccggctccggctccggctgacgctccggctgtctctccgagtccgccccggccgagcgacgggcgatctcgaacgcgagagtgaccgtgcgcgctccttgcccttgtccgaccggcgcttgcgcggcggcgagcgcgagcgcgaacgagagcgcgacgatgccgagcgcgagtcgctgccgctgtcgctctcagagccggacaacgagccggacgacgaggacgagacggagcgctcgcggcctttgcgctcggccgctgccttctcggcccggagacgctcgcggtcctcgaggatccgagtcgccaagccctttctgcaagacgagcaaagagcagacagaagcaggcgtcagcactggcagacaggctctgtcagagcgaagagccacgtccgaggcacgcactttggcaagaactcctctgggacctcgaccgacggccggtcgcgcgtgttcgacgccttgcccgacagcagctgctgcgtcctcgacggtcgagccttgtaaggcagctccttgttcttgcactcgtacgtgtagtggccaaagtctgccagggcgcaggtagcaagagaagtcagtcagcgtctgggagagccccgtcgcggccaggggtaggccgatggaggggtcggacgcacggagacacttctggcacttttgcgatgccggagcacgcgactggctcggccgggcgccagagtactgatccatcgagcggccagacatggtgaggtaggaagaatgggggtgagcgttgggaggctcgaggcgacgaccgagggcggcgcgcagggcagcttacccctgacggtcgtcctcgagacgtcctgctccgccgagctcacctgccgatcaacctaacgagcacgaggtctaccataggacgctcatctcggcatccgtctcctccctcgccgccgctgtcgagaagcgaaggaggcttgggcgcggatcgtctacaggtgccgcccgcagaacgcacggacgcgaggctgaaggctcccctcaaccgcccctgtcgtccttccctccgcttcacctccctgacaacgttggacgagcagcttcaggcgggcttgctgcagatcctttcctagttcgcaggcggtcgaagttaactccagcctggcctggccggtctgcccgccattggactcctctttggccggggcggaacccccttgacgtcttcctgattgcccttctgaagtccgacccagagctgaatcgcgcagcgcgacacggccgctcttctcgaggctccgcccgaggcagactagccttcttctttaaaggaggccggcagcctgacctcgtcgtcttcttcctccagccatctccctccccctccgccctctgcccatctccctcgccgagaagcacatctgagcgacccttcccaacatcccgctcgagcgctctcagccctcgcagatgacccgccgcgcagcccgctcaactctttcaacgtccagtccctccgctccgccggccagcgagggcgcttcctcctcgccggccgagaagactagcttcctcaccaagctctacgagtgcgtcttctcgtgcttgctgctcgctcgccctcccgctcagcgctgatatgcgtctgtcgcctgctcgccatcctgcagccacctcgcgccggcgccgacgacccctgccgagcgcgccccccgcgtccgtgccgcctcagcgcccgccgcctacgcgccctcgaagaccgcgtcctcctcgctccacattccgacgccgcctgtctctgctatccgctggaccgaaaacggagacgcgatcgtcgtcggtacgttccttgctgtcgtttactgtcgctcgcgcccctctgggctgactttcgcgctcacccctcttcccaggctcggtcgaggacctcaagaagcacacgctccggccgctctacggccaccaaaacatggagacgttcatccgccaggtgcgtgatcttgtcgatgggcacagccccaagcggccgcttgaccggtttccctcttgctcgtccagatggcaatctatggtcacagccggagccgcccgtccgtccctgttaagactccctgacgtcttccttgctcatttagctgacgtcggctctctctctctctctctctctctctctctctctctctctccctctctctctctctctatctcgtacagcgtccccggcgagctccacttccggcaccccgagttccggcgagacacgcctcgcaccgagtgcgtcccgcgtcgcttgccgctgcgtcttattagctgacccctcacgcctcacctcctctccggcccatcagcatcctcaacgtcaaacgcaaggctaccaacaaaacgagccggtcctcctcgagcgcgtcctccaggcgatcgacgacgacgacgaaggctgcctccgtttcctcgtccaagggcggcttgagcactacccgccgcatcgtctccgacccgccaagctcgtcgccgctcgcgccccgcgtgccgcgcgggatcgtcaagcgcaaggcaaagctccgcggccttggaccggcaccggcgccgacgatgccaggcgtcaaggccgagaagacgacgtcctcgagccgccgctcggccccgcgcaagctcgagacttcggcgccggcgctggctcaggcaaagcgcacttcgcagccttcctcggacgctgacgacgagcgcgaggccgaggtcgaggtcgcgccgatcagcatcgctccgaccacgcccgaggcgactaaggtaagtcgccctcgtcccgacttcttctcttcactgagcttttcgactgacactctcgatcaacaggagcgcccttcgcgcaagatcaagatgtcggacttcctcgaccagacgccgacaaaggtatcattctcggtgagtgagcttgctaggccggctcgctttcgctccgagctcagctgaccttctctgcctctctctcagcgtccgctcaaggtcaccacggaccacatggctctcattccgttcccgtcgatgtcgcccgtcaaggagccggccgagcttgtcccgtcttcgatcgtcatgcaacaggctgcggtcaaggagctggccgtcgcccacctgccggctgcgctcggagtcgattcagcggtcgaggcagagagcgacgtcgatatggttgtcttgcctgaagttgacggcaacgatcaagcacctgccacctctgcgtctgacatcgacatggtcgacacgtcgtccgtctcgtcgctcgacacgccggtcgcgagcccgatcctcgtcccgcgcaactcgatccgtgcggccgagctcgagtcgcaggcagtcatgacgccgctcaatgtcgccctctcgcgcacgctcgactcgttcgcgttcccggccggctacccctcggctgcgctgtacccgacccggccctggtcgtcgccgacgccaatagcctcgatgtccgtcactggcgatgccgagggtggcgcgcatgcgcccatctaccgccggccgtcgcttccgtcgctcgtctcgctcggcctgatgggtcgcagcagcgcgccgctaacgacgacgacgctggcgatgcgtcgcgcgcgcagccagagcctgctcgcctcgtctggcccgcccatcgaggtcgagcccctctcgcgcccgtggtcgccagcgtttggccagtggcaggcgccgccgctctcaccctggtcgagcagtgcgtctgagtcgagcctccggacacctctcgatgtcgagatgtcgctcccggtcatcttcgagtcgccgccgccgtctgcgccatgctccgcttcgactggcctcgaatcgaatgtcctcggcatctatctcggcggaggtgcgtgcgtggcgctcgagcaagcgcatggtccaccgctgacgcctgctcttctgcccgtcgctatcgcaggatcggtcccgcagctctcgaccatcacgcactcgcacctctcatctctcgcttcagcgcctcgcggtcctcggatcttcgcaaccctgccgagccgggctcagggcggccgtctggccgtcatttaggacccagcaccctcttttgtcctcctttctctctggtttcagctcgcgccctcttggtctctcgctctctccttcttcttgcgcttcatagacgttccttccgtcaaaacagcctcgtccgggaggtctagccggcccagcctctcccaatgtgcccctctcccttcgctcgcagcgtctcgcctccatgccctcgtacagctcgtagatcatctccatcatctttctcgtctctccttggctgacatccccttttggttccaatcgcaatgaagacgatcgagtcgagcgtctggcgctcgaagcaggaggagaggagacgggaaggacgagtggctgacgaagcgtgtttgccaaacagttttgggcgaaggcttagggctacaagagatgacggagaagggggggagatgatcgtccagaaggtatcagaagaacggaggagcatgggtttaaggactgtggtatgcgcgcttaagcagagtgctggtcgtcgtccatcgactcgttggcagcgccgaccccggcggccggcgcggtcgtctcgggcgcgtcttttttggccgacgctccgtccggccggattccgtcggcagggtcgaccggctcaggcgagccgctctggccctcgccccggtcgtcgccggtcgacgcccagatgttttccatcttgctgcccgaggcgccgctgaaggtcgcgccgccggcgccggccgtcaggttgagaccgctgctctcgttggcaaaaccgccgacgccgccaggctcgtccgcctcggagacgccgaggttcgagaggtagccagtgccaaggagagaggcccagtcctgccaggcgccgtcgctgacgccggcctcggggttctcctgtcggaccgacatgtcgaacggaacggccggcgggacaaagtcgttcgggacaaacgtcggcgagcgctgcgaagccggcatcaagttgacccagttgcggataaagttgtcgtccgagtaagtcgggctcgtgttcgacagccggagcggcgggagcgcgtggtcgggcttgcggctgtagcggccgggcgggacaggcttgatggggtacgggtcgttctgcttggcgctgaccttcgggtggctatccatcttggagtccgactcgggcgtcgtcggctgccggatcgacttgtcgatgctgctgatgatgcggtagcagcgccgggcggtcgagacgagcgacttgggtgggatgatacgccgccgttccttgtcggccgtctcgacgccgccctcggccgcccagccgagctccttgagcaggtcgagagcctgtgttcagggagagcgagcggacaatcagtcgttggcagcacaaacggtcggttgaagagacaagccgcaccttgtcgagcgcagcgaccgacagcttttcgtagtacggcgtctcgggctcggggtaggtcgcgttcatgatgcggctgcgaaaggggcatcagcgggtcagccagggtggttggttaggaaggtgttgctgttggttgtaacgcactgcgcaagcgtagcctgtcggtgagtgggtgggggcaggacagtcagctcagggcaatcaactgacacaaaacgagagcttggcgtacgagtgaagcgcaatagacgaaggctgctcgtcaacaatacaggcaaagcgcgtcagcagactgggcatctggccgagacgtcagcgctcgcaggtagactgaccgagcgaccaccaccaccagccggcccacgccgtgttccactggtcgcagatcgtctcgaggacctcgatcgccgcctcctggcagacgtgggcgctcttgcgcgccatctcgactgagatagaagggctgacagcggtcagtcttccgcctgcagcggcgcatgcgtcgggcgaggaaggccactcacacttgagcgaggtcggctcggggacctggtggggccgcggaaaagccacgacccggcatttagcgtggcaaggcgtctgagcgcacgagtcgcaagagggactgacactgccgttcggcgtcgtgcagaagtggtagaggaaaggccggtagagcagcacgcgcacgttagcgtatctgcagcgaggagaaagtcagcaatccaactgagcaggaggcaaaggaagtcgcgacgacgccaacctcagctgcagcttgagcgcctggtcgtggaaaggcccgcgcttcggtgccttctccgggtccgaaaggtgctcgggcaggtccttccgccaggcaaacagccggtcctcaagcttgaggacctggtgtgcatccggaaatgtcggccgccgggcgaggtcgtagacactgaagcggagtgacgacgatgattagcactcaagctcgtgccgggggctggtaacaccgccagaaactaagcaacaccgtatgagaccgagagggcacgcactctcgcaaaatggacgccttgacgctcatcagccggctcaggaagatgaaatagtcgatcttgcgcggcttgcccggctcgcccagggcgatcgacccgtccggccgaaattcgtcgtcatcgatcggctcgggcaagcactcgtcgcggaagtcggagtcgtacgtgcccgtcgtcctgtagagcatgacgctcgacgtcggctccatgacgaggcagccggcccacgcccgctggcggagcatccgcgtgtacgggtcaaacgtcttgtttaccttgtcgttctcgagctgcaggccgcggctcatgttgacagcgaggccggtcgcattcgagctgagattacctttggagcagctgggtcgagaaagggccgacgagagcgtcagtcaacgcgaaccgagcagagacgacgggccggtgacgcacctctgcgaaaacatgctgagcagattcaggtagttgatgatgtcgacgttggcgagcaggaggacggtcgagcccgacgtgagggcctggctccggcggaagaagatgccgaggagagcggcgtcgccctcgcccgaacgaatcgcgcacgtgatggcgaagaggaggttgacggtcgcgaggtcaatctgctccttggtcgagtactggtgcgtagcgtgggccgaggcggcgcagatacgccggtacttcttgtagacggtcggaaagtgtacgacggggaagagccagtggatgcgctgctcgtagaacgttaggaggtcggccgccagcccgggctcgggcagctcgtacatctcctcgtaggaggccgccggcgcgagggctaaagggacggaaggcaaatcgtcagcgagacgatcactcgccaaagacgacagcgcgcttaccctgcgtgacaaagtcgtcgatcggaaagcccggctgaaaggccgaggcagacttgtagtgctcgccagcgagccgggcggcgccctgttcgacgagagcggtctggcgaccatcgcctgcgtcgttccggaaacgaaaggatcagcacggtggccaagcgatctgagacaaggagacgcacggccttgccgctcccaacgcgcgccgtcgcccatcattctgcgctggtcgccgtcctcaccgtcgccgtcggcgctgctcgtcgtgtcttcgccgggattgaagtcggtgtgcgcccggccgagcccaggcggcccatcgtcgtcaccgtcgacagagggcgggtgctcgcgcagtttagccgtcacgttggcgacagtcgggagggtatgtgtccgacgagaggcggtggagctggccggatctggcctcgagtacgatgacgaggccggtgcggtcgggtagctctcccagggctgcgactggccgtaggggtacgagccctgaccgccggacgaggcggtcgaaccgctggtgaggccgctaccgctcgcctcgtgcgaaggctggccctgtgtgctgccgctgccgtggctcgacgtcgtgccgggcggtgcggtcgtcggtgtcgggtaagcggtcggcttcgaggcctccttcgaggcctccttcgaggacctcgccacggccgaccgttgctgggcgacgaccgaagccgaatcgaccgggacgccctggctagggcctgaccggggcgacggcagctgagagccctcgccgctgccacccgatttgggcgaggggtcaagtgcgcgcgatccagagccagagccgtgcgacgaggggttggaagcagaaccccgagcgctccggtcctgttgccggtcgagggcggcgagtttagcctcgagttcttcaacgtacctgcaggcgcaagtgggatggtcagcgagcggcagggctgaggatcgcgtgaggactcgaacgtacttaatggtgactttgcgcgtcggcggcgggtagacgcagtcgagcttgttgtggacgcagagcgcacagggctgctggccgtcgcacttggaccgtttctgtcggcaagtgactgggagagcgacggaatcagtctccgaccgccggcgggcccggacgaaagttggagtctagacgtacagcaggcccgctcgacgcgcttccgcttcttcttgccgtcgccctcgtcctcctcgaggacgaccgtttccttggccgcggttgcgagcgaggccttccggccggcggcagcggtcggcgtccgatttggtccgccatcggtcgagaagctcgtccgattcgtgctgctcgataacttgcgcatgtcgacgtctgcagcgacgaccgctcccgtcaccatcggccgcgtcggcgagtgctgctgcaagccgatgcctccgcccgagaggggctcgtcgactcccatgtacgagatggggctgtgctcaatatgctggatatgctgcagatgcggcgtgtacgtgctctggtaggagaccgaagccggcggcgggccgtagctcatggccatcggctgctgctgctgctgctgctgaggcggcaggaccggaggcggcgggccgtacgacggatcaaacccgctgccgtcgggcgggccaaagtcgtactgggccggcagcgtccggtaggtcgcatactcctgctgctgctgctgctgcatgtgctctggggcaaaggggaattgcggtcgaaggagaggagaggtcgaggtcagtttccttcgtcgaacgaagggcggcgggctccgggagcgctctccggccctttggagcgatggtctcgaacacgctctcagccagactcaccccggggatcaaagctgcgttgcagctcgtctggtagctggtgctgctgctggtgctgaccgcaggtgtcgggctggccgctcggctgcccccaagctcggccggaatcgctcatgcgagtctcgaggcagggttgagggtcggggcgtagcctgtttggtttcgcggaccaatcccaccggctggttgggtcggtcaagctctcccggctgggcggccgcggcgcgcggcagaagggatgggttccaagcggacgagatcggagaaggacgagaggtgtgagcgtgcggagggcgttgacggtggctcgtccgctcgtgggtggtggtgaatgtggtccgacgaggaggaggagaagagtccgttcgtgtgtgcgtgcgagctggcaagccagactcatacgcgcgcgcgcacacaaaacggcccacccgggagcgacttccggcgagccgagaacggccctctgttcaaccccggcagagagcccggcacgccctttgttggccgctaccaatctaccattctcgtctcaacgcacgtccgtccacgctcactcagccttgcgctcgacagcacctcctgctctcaaagggcacagcaggcggccgtcgtctacgagtcattacatccgccctcgcataagcgctgtgccgtctcgctgagcctctgctcgtttcggcgaatataaagcggcggtggtggtggtggtgatggcagtgataacggtggcgggcgatccacggccaaatacggcaaccgccaccccttctcgacgagaggtgacgcccttcttgttcggacgttcttcgcggaaagcatcccgaacaattagcttcagagccggagccttcaaccgctcgtggagaagggcagcaggcttctgtgtgtgcagcgtcgacccttcttcgggcgtcggagccgtcgtctctggcgcgccggcggggggtcaaatttcctcgtcgtcggagtccatcaggtcgcgctcgggaaagtcgccgatctgaatcttagtcggccggacctgtgaagcgatgtgatgtcaggtaggagagaatgccggatgtgaatgacggaacgcacaaagatgccgtagagcgggccctttgccttgaagtagcgctcacctttgacgctgttgagttgaaatgcgcaaacgtcagcagagaacacatgcaaacgccgccgtcgaaagaaggtggatcttcgccgacgcacctgccgtcattcttacccgacggctcgtcaagctcgacgccgacccacgtcccctggccgaacgcggtcgggccgacgaaccgaacctcgccccgcatgcccgaccccttctcggcgctctcgacctcgcaccgccggccgacctcgagttcctccggcagactctcctctgtcgccgctgtcgaaacgtcctctgccggcgctgcgccaaacttcggcccgagccgctgcgagcgtaggaaggcctggacggtgtcgggccggctggcatactcggcgtccgtcagctcaaacttggccgtctgcgaagcgtccgtgaaggcgccggcggcgaacttgggcgtcgggtctgtgttggacacctgcagcgaggacagaggaggtgcgagcgtcagctcccggtctgcactccgagggcccaagcatgacggtcgtaccttgatgcacatccagtctgtaggtcatctgaacgacgtcagcgagcagtcataaaagtgaagggagaggtcgagactgaccaacgacgccaaagctgcgcagcgtgcgtgcatcatcgccctcgagcgagcggacgagctcgccttcgtccgaccggagcaggtcgagccgctgcgagttgtacgggatgccagtgatcggttcgaacttgacctgtggacggggagatggagcggaccggtcagctctatcttcggtcagcgagccctggctgagcggcatggccgcaccttgagctgtccgatggtcgagtcgatgtcgagcttgcgctcgccatgcgtgtcggccgaggcgacccagacggtcacccaggtcgtctggaactgctttgacgacttcatcagagagtgatagtacttaatagagtaggataggacaggcgcgagaaggcgggctgcgatggcgggtctgaagagggtcgacgtcagggaggcaggtcgaacggaaaggggcgacgccgccgagcagctttggcacgcgagagtcgtcaaccgtcactagccctgccctcgcctcgcccttttcgctctcttcttgcttgtcacggcacccgcgtctacagcaccggacagaacgctccaagctatagcgttgctcgctcagacgaagtctaagagaggccagcatccctcaaactctctcgccgaccgctcgtagctccgccggccatgagctcgaccgacatcaagttcggctcgcaggtgttcgacctcgtcttccacccgacgtctgacctgctgtttaccggcctgctctcgggagacatcaaggtcggttcctcttgcgctggcttgaacgggtcgaccgagcgctaaccgccagctctcgctccgacaggccttcaactacgcactcggcgagcccgagcagccgctcaagtacgccgaggcctggagtatcaagccgacaaagaagagctgtcgcggtctggccctcgacgaggacggagacacgctctacagcgtcggcaaggagcggaccctccagtgcgtcctcgtgtctgcccgagctcgcgactcgttcggcgcagcgcagcccgtgctgaccgcgtggttccgaacctcagcgtgctcgacaccaagacgggcagcatcatcagctcgataccgaaagcgcacgagtgtgtccagcctccgcaggcactccctgctgtcggcggcgcgagctgaccgaatccctccttcgcgcctactcttgtctccctcccgcgtctgccctcgttcgcgcagtgtcccgatcaaccgcatctcgtacctgacaaaccagtgcctggcgacgggcgacgacgacggcgtgatcaaggtgcggctcggccagccttgtcccttgctgcgacatgggccgcaaatgacccctgccgtcgtccccgcgcccgcagctctgggacccgaggattaaggcctcgtcggtcgcccagaagacgtacacgcaccactgggactacatctcgtccttcctctactttgacgacaagaagcagctcgtctcgacttcgtgcgtgccacgctttggcgtttcgccgcatctagcgcaggccgcgagacaactgacgcgcgacgaacctttgcagaggcgacgcgacgctgagtgtcgtcgacatccggggcaacaaagccgtgccgcagacggtgtccgagtcacaagacgacgagctgctgtcgatcgtctcgattaaggggtgcgtctcatacgctcacgttccgccggcgctctctcagctgatgcccttgccgacgttgcaccatcttgcagtggatcgaaggcgctcactggcagcagcatgggcatcctgagtgtctgggatcggagcaagggctggcgcgactgcatggaccggatcccgggccacccgcactcgatcgagacgatcgtcccgctttcggacgacattgtcgccaccggctcgtccgacggcatgatccggctcgtctcgatccttccgtcctcgctcagtgagtgcacaccttctgcctggccgtctcgattcaaccgctgaccctctcgacaagcgtcgcctgaaagtgggcgtcattgcgcaccacgacgattacccgatcgagcggctcgccatcaactccggcatgacgctcctcggcagcgcaagccacgacgagtgcgtcaagctgaccgacatccgcgacctcttcggcgacgacgacgacgacgacgaggtggacgtggacgcggcgacgacggatgccgagccgagcgacgacaaggtgcctgtcggtccggccgcagcacgagcagcaaaggcagcggccgccggccaggtcccttgggcggtcgaagagcgcttcgactggagcgaggacatggagacggacgacgcggatgacgacgacgacgactcggatgccgcgatggacgcctcggacgacgagagcgagcaggaggagtcgaccgagggcgagtcggaacgaccgccaccgccgccggcgaagaagggccggccagagcggcgcgagcgtctgcggccgggcgagggaaagagcagggacgaggccgaggacaaggagcggtcgtcgttctttggcggcttgtgatgctgtcgatgtcgccttgtcgtcgagcacgttccttctcagccattgccgacgtcctgtccttgtgcctcgcggtggttggctcagctgtcgattaatacctccgtcggttgaatacttaccggtgccggcgggcgagcaggtggcgccgttgacgccggcggctgggcgccacgaccggcaagtgaccgatttaacctacccctgctctgctcgtcgaaggaggcctggcaggcaggccgtcttttatagagggagtgcttcgcatctcgtacacacgacctcgacatcaggcccgtgcccactctgcccactcgctcgccgtgcgtgccttcgacgccctccgtcgccgcactcgcgcgcttcggatcgagccgcacgcaaccttcatggaaggaggggctgacgggcgtcccttcttcttaccttcccccgcatttgccggagaaaaggtcccttgccagactgctcggccctgcacacgaacgaccaccctcccttccaacgacccgacctatgcgtgcctcgtcgtcgtctggcgcgcctcccgccatgccggtctcggccaaaggcaaaggcaaaggcgtcgctcgacctcgccaggctgccggccgccagcagaccggttcgaccggcttctcgccatccttcccggcgctcgacgaggacccgtctggcctccagctcgagggctggctcgcgcttgaggacgagagcggcgccctcctacgccggttcgagctccagcggcgggccgtcctcatccttggccgtgcgtcgccccttccgagctgcccttgcggatgatgcacgctgatggccttcacctcctccccgtaccgcaacccccttctcagagccgacgccggcagatgtcgacctactcatcgattcagcctcgccggcgacgatacttatcctgcccaaaccgtccgacgcgtcggtcggctcccgtcccaagccgagcccgcgggtcacttatctccggacgaccgtctcggagggcggccttggcagggtctttgaggaggccatctctctcgcgctcaagtggaaaaaggcctgtccgacccgccggccggcgagctggttcggctcgacccggagcagcggcatgggcccgccagcctcgcctcctctggccaaagcccggtcagaccggcctctcgacgtcgtcctgcactacgtgtacgaccaggccccgccgctttcgccgacgtaccctgctgccggggcgtcggcgcagcacatgtcacacaagcggacagcatcgacccagtcggtcaacctccagggcatgctgtcggcagccttcctagtgacgacggccagtctgccgtttcttgccacccggtcgtcgactggcctctcatcgtccgcctcgtcgacggtccgccgtccggcgccggccgtgctcagcgcgagcagctcgcgaccgagctcggtctcgtcaacggcctcgtcacgcctgccgacggcggcctccatgagcgacaccttctcttcatcctcatttgccggccggacgctcggcgatgcgcccgatgcggtcctcgctcatgttctgccgttggacgtgccagcacatctgcctcaccttctcgacggcttcatgcaaacattcatcgcgaccaatccgtcggtcctcctggccatcgtcccgtcaaacgtgctcgccgcctcacccgactaccacgagcctgatccgtccagtcccgcgagcgacggctcgccagcgccgccgtcgatcctccagctgctgctagcgtccgccgtccggccgccccttcctccgttgccatctctggcccgcagtcgccggggctcggcctcgagcatgcaatcgctccggagcgggacgacggcgagcgcgctctcaacaatcagcgccagccggccgaccgagggcctcctctcgtatatcagctcggcccgggccatctcgtttgtcacgacggcgctcccaacgtcgacctctgcctcgtcgtcggcctacccgtcgccagcgacgccgtgcatcgccctcaccccgccctcgccgagcacgccaacgtttgccggcgctccgcggtcagacactcacggcctgccacagtcagcgccgccagtacccgacctggtcgcctcatcctcgtcttcgtcgtccacctccgacgaggtcacctcgctccctccaccctcgattgccggccgcaaggcgctcaagagccgcggcagcttcgcctcactgtcgacggcaagcgccgccggcagcggcggcgagcgcaaggccaagtcaggcggcttctggagccgcatgttcggccgcagcaaggcctgaaacccgaggccatacgcccctcgatctcttctagataccgcttcacacggccatatctgcccgaccacctgctttttcttcgttttcttcacctaattttgcaacctccctcatacagtccgtccctagagcgccgccctctatgccgccgcatcccttgtcctgtagctctttgaccgctcgctcgcgctcgcccgacgccacttccccgtaagctctgtacccggtcagctttagaccccccttcgccgatgaaacatgaccgttcacgagatattgcgcggcgcggcgagcgggcctccttgccgagggctcagagcggcacgaccgacagacacgagcgcagccgtgcgtcgcagcggtgcccgcaggagagttgagcgcacagaggcccggccgaccggacagcgggacgcgaaagtcaagagcagtctccattctattccttaggcggcgcgctcgttttcagctgcaagtggagcagatcgtcagcgatcacttatgggcggtgaccgcgtcatgcgtagggggaagcggacgcacctggaggccgtggatgccgcgaatctcctccttcaggacgtcgtttacgagccggtgctgcttgacggtcgacaggccgatgaaggccggcgatgagacgcgaatctggtagaaggtgccgcagccacctgcgaggagtcggatggaagggccatcggcggtcagctcattggctcagtcagtccgaccagaccagacacgcacccgacgtgtcctcgacgtcgcactcctcagcctctaaccggtcgatgagcttcgctcggatctcctcctcggcgccagagtgcgtccgcgatggcggggcgatgaatgccggtcgggtcgaggcgaacgaccggcggacgaggccggcggcgacgggctccgaagcggtgagagtggagcgagccggcgacagcgacgtcgaagaccgggcaacgagccggagggctggaagagaagcgcgcaggctgaacatgactatgacaggagaaggtatcgacaggcgagcgagtcgaaagtgggcgttgacagagagaggcatcggccgctgcgtccggccgaagttcggcctcgctcggagcagagagaaagaaggtcagcctgaccctccgacgtcgtcctctcgttccaacagcatccttctcttctcagctcatctgggccagctcagaatacctgtcgtcgtctgctacttctgcctagatcggcctcctcgctctaccactcgccgacgatgccggccgtcgacccgccgctccggcgcatgctgctcctgccctcgcgccgcgcccagaacggcttcctctcgtcaagcatcactctcgcgctcatcctcctcggcctgctcgccatctacgtcatcttccagcgccgatcacgttccgcagagcgcgctcatgctgctcgggctcgcagcgatcttcagcagccgaccgagggcgttcacgtgctcgacggcgtcgcctatcggtcgagcagcttctgctggtcgcccggcgctcgctactctctcatgggtcggtccctttcgcctagctgagtaagttgtcgtcgctgatatacctgctactccgcttggtgatagtcgtcgccttcctcatctttgcgatcaacatcttcagtcagtcccggctcatcgcccgagcgagggcagtcccccttgcgctgcgcccgcgtgctcaccatcgtcctcgtgctgcctctcgaaactgcaggcatcgtcgcgtccgcgctcactgagccgatcatgcgcgagccaaagttctggctcgtcaaggtccaggcgatcccactcgcgacggtgcggccccctcctccggcctgcgcctcgaccgcagcatgcgcagtcgagctcggctgacggtgcctgccttcgtcctcgtgtagatcgtcctctttgctcagctcatttggaagcggccgtcgatcgaggcaccggctcagatcaaccacacactcatcctgttgctcgcgttgatcctcgtcgtcctcgcgccggtgctcacctccattcgtcagttccagtcgtctcgaggcacttaggagatgcccgctaacgcgacttcttaactgcagccgtcgactctgaccatgggagactgagtcttgcgcgcaagatcctcgagcacattgttgggccagccgctctcatgggcggtctcgtcgccgttcaccgaatcgtctacgagcagctgtgcgtccgcagccgatcctgctcacaggcgtctgcaaccaagctgacgcgagccgcactctgacagggacaacgaggtctcgcagccttcgagctccgcttactcagacgaagagggttacctcgacgacgaggagggctacgtctatggcgacgacagcgacgacgagcggctcgaggtcaatggacaggaggaggacgaagggctcgtcgcagaggattactctggctcgctcgctctgcccgagcatgccgacgccgggcgggcggatggcctggcggatggtgaggagcgggccgaccgcctgaaggtcgtcgagacgcgctgagagtcaacccgatgctcggctcatcttccgctcctggacatgttcttcgctgggctcagtcacgatcatgacctcagactgtacaatccccatctcgatcagctcggaagggcagggtctgcgagttaggcgcgaccagcaagggccagtagtgacgttcgcccgcgcgcagtcgcctgggtccggagggagcagctcagcccagcaggggcagtcgacgagatgcgaacgggccctcaacgaccacctcgattacatatcctttgaccccttcgccgcttctgacggtagccctttacttctcctcgaacgttatatgtccgacccttccatcccttcgctcgcgcccccgccgctgcctgcccggaggtcggcgtcctccgtcgccgacgaccagcttccgcctgcatctccaccaccagcccctttcaaggcccagccgccacctctacctggccgaaaactgccgcctgcactatctggcagctcggccggtcaaaggctcgacgacaagaagaaggcggcaggcacgcccgaggtcgaagagctgaacgtcctgctccgccggttcgataaggtcagcctccctcggccgggcttccctctgccaccctactgaccaggcgcctcgcttcgactcctctgacagcaaatcctccatgtcaaggccatcccggctggtgcgtaccgcatctcctcggcgccgcctctgctcgacctccagccagcgccgaaggagaacttctcgcccgagaagcttcggagcagcaccgagcgcctctacgcgactgtcctcgtcggtctcatgcgcttcggccaggagattgtccggcttcgaagctgggaggagacaacaaggagctcgctttttctcgctgtgcgtcctcacatttcacttccacgtctgctatgctctgcgccgcgagccggctcgttgctgcgtagctagacgagctgacctcttctcctccggtcggcaggcttacgtcgccgcgtggagtgcccatctcgtctgggcatcctgcctctcgtttgtctcggtcctcgtccttgttccagcgtcgcgcaagattctctttccaccgacgactgcgtctctcatcactgccgggccggctgtcgacgggcccgcgctcgccgagacggtcgagcacgacgctgctgtcttcgtagatgggctggagggcttgacgctcgccagaacgctcggcgacatcaccgagacgagtggggatgacgggatcgtgaccgagccggatggccagggcactgatgacaagtcgcctcggaagggcaagggcaagaagggcaagggcaagtcgtcggagcgcgacgagatgatgcgcaagattggcacgctggtgatgcagctggcgggagacctcgccgacggctgggagcggtgggcaaagtgggtcatctttcttctcaccggcagaatctcttcccttgacgagtgctgacactcgcctccgtgcttatcagcgccctctcgcccacaccgccgttctctggtcactccggccgagcgtccatcttcctgtccattctgctgccgatcattggttcgtctcggcttgccgagctccgcgtcgcaaccgtcattgacacgcaagacgtctttcgcccagtctcatcagccatcttctccgaccgcgtcttctcgcaggtcttttcggccttcattggcttcctcttctttggcggcccggtgctcgcaaggctcgcagactatctgagcagcaactacccgggctggcaagaaaggatggagctccgaaagtgagtcggcccgagtgaaggctgcagcaagcaccaacgctgatgcactcaatcggcccgtcttcacagcggcatccttgcaggctgcccgacggacgctcagctcgctttgcgtttactgagagatgcagaggccctccagcagccgctggctccaccgccgccgcctccggcaccggagacgctcgtcgacgacagcgagagcatagccgagtcaaccttttccaatagttcgacctctccatccgagcttgcacccgacggcaagaagaagtctaagggaggctttgggctgaagctagccggagcggtgcggacggcggcgaaattgacggaggaggtgcgtctcgagtccgagtcgtgctgcttgcctttggcactgacgttcgccgctgctcggccgccagagcgccgccatccttggcggccacaaacaagtcgactggggccaggcggtctcgtcaacgctgacacggatgaacgtcccggtgccggcaacgcgggcggcgcagacgttgctcggcttcatcccggctagggatgtcaaggagggcgggccttcgtgtgcgtcctgcttcgcgcagcacacaccttcttgctcgccagcggctgatcccactcttcacccctttccgcagcctacttcgtgtaccacgccggtcggccgggccacctgctcatccacccggcgcggactgcgagccagactcccgcctcaatcaccttcaccacggtcgaagacccctcagcgcacgagcccgagcccgcgaacgacggcgtccagcccgacgggagcggcggcaagaagcagcgcctgcgggtcgagctccccgtcgggtcgatcgtcggcctccgaaagaatggcctcggcggttggcagggccggatgctcgtcgatctggcaacggcctcggcgcttcagggcgtcggcggcgctgggctcgagattgtcgtcagccgccagcgtaagggcggcaaggcgaaagatggagaggaaggcgaggaggtcgcgtatgcgttcggcgggattgcccggcgggacgagctttttgatcggctgattgcgctcggcgaccagcgctgggagtgtctctagaatgagcctcggtgtgcttttcgtgagtccggtcattgtgaagggccatggtgctgaggcaggtggctagaaatacagttgggctccggccgagtgtgtatagcggagcgtaagtgcaggagggcaaggtgatgattggtgagtgaggcgggaaagatccagtcgaaagatagggcgtggagagatgagcccaggtctgtctaaggacgcggaagctctagttgtgccggcgctggccgtgctggtgggcgacagggacagcgttcgggatctcctggaccggcacgccacgctggacgacctgctgcgtgacgaccggctgggtgacgacggccggctgctggccgacaaagtgcgcgcggaggctgtcccactcgcgctccatccggtcgagccggtcgagcgcgtgccggacctcgcccttgggcccgcggaagccagtcggcttggccgagccactgctgccgcgggtgaagaagaagtaggcgttggtgaggaggaggaagccaacaagggcggcgagcgcgagcttgaccgggtcctcgagcagctggtcgagcagcggctcggcgtcgccgctcttgctgctgctgaccttcgtcttcgatgcccggcgcaccgtcgtctgcgtcggccggacctccttagctgccggggccgcgtcgttggcgccgtcgagccggatctccgggtgggccttgatgtggtcgcgggtgtacttctcaatcgcctcgttgtactccttctggccggcgatcgagctcgagttgacgacgcccttgatgagcgaccggcccgaccactcgacctcggtcgacgcccggacgcggacgccggccccgccggcggcccaggtgaaggtcgtcatcgacttgcacttgaacgacttgccgctcgggacgttgggcgtctgcgtgacggtaagaatcgcgaaaaacgtctcggcgtcctccttgacgatctcatcgtggaagacgcactttgtcgagctcgggccaaacgagcccttgagcggcttgacgtacgagtagtcgcgctccttctggggcgcggggaacggcgggcagtcgacctctgcaagcagacgaaggtcagcagtcgatcggctgtggaagagaaacacccagacgcaccgagaaagccgagctggttccagaggccggcgacaaatgcgtcgtcgcggtaccataggtcaaagatcgtcttgggcgcgcacgggtacgtgacgtccatgcagagctcctcaaagtcgtcgatgccctcggcctcggtctcagcgtgggcgccagcagcggcaggggccgccaccggctgcttggcgtcgatcgccgtcgacgactcctgctcgaccttgacgcccgcaatcacaggcggcgcggtcgagccggccgactcgccggagcggacggacgagagcgaggcggcgcgcgcacggaactcggcggcctcctcggtcgacttgcggccggtaaaggcggcaaaggcctcgggcgcctgggtccgccagagggcgaggaggatgtcgagcgtctggtcgcgctcgttgagcgtcgaaaacgagtactgccggaaggagagcagttccaggtcagcctttcaggccgcgaaagcccgcgctacagctgggacgcacgacctcgccgccctggactgtgatctcgagcgcattcgggatgacgagcgctgtcatctttggctcgatcgagacgatcgagctgatggggaagtcgacgagcgtcttgaagccgaggatgttggacttgaagtagatcttgaccttggagacgtaaatgcggccgtggacgagtatgtcgcgggcgagggcacagccgtgggctgagcggacgggcgggagggcgattgcgagcggcgagagagcggcgcgggtgaggtcgggcagagaagagatcgcgaggaatagattgggtttgacagggacgaggtgatgatgcgatgggtttggtgagggaagggcgtggtcagctgcgcggcctcactctgctggagcaaggtgggcgaggggaccgactctcgacgagctcctcgtcctcggccggcgagaacgcatcgcgccagtccttctcgcgcttaggcttgagctcgcggactgagctgaccgagacctccgaggcggacgtgtcgaccttgcggagctcgtggccgggcggcgcgaggctgctcgacggaggagcggcggcggcggcgggaggcgcggcagccgtcgtcgtcgtctcctcggtcgtggtggtctctgcgtactcgaccggcggggcgagagccggcgtctcggcgatggatgcggtcgtctctgtggcgacagacatgaggactgtaggctataggggaggaggagggatgggaggagtgatcgttggcagagggcaaagccagacgaccaagggagctgtcaatctcgcgcgcgcgtgagcccatgacgttggccggcggcccggagccggacttccgacgggtgtgcgcggccctccgacagcccagcaccaccgccgcagcacgcccgtcagcagaggagtacgacgttggtgcgctggccccaagcagcacgaccgcgaagggctgacgtgtaggtgggtaaggcgcgcggacgaagaggagcgtcagccgtcagccccgccgccgccgcaagccatctgcgtcagaccgcccatgctcgcttcaccgccaactcttactgagaagtgtcagaacgacataaacagggctgcttgcgatagacatgctacaagtagagagagcctcgagggatagagagcaagagtgagagagagagacaactgagcggccggtcatacgccgccgaggaggtccatcaggagccgggcgcactcgacgtcggtcgcgtcgtgctttctcaggccgagcggggcgggcttcgtcgttggctgggcgggcgcagcgacgggtgcgagtgggaagggcgaggtggacagagcggcggggctggtaggggtcgtcgtcgaggacgctggcgagtcggtctcgtgcgggatcgagcgtctccggctgctgctgctgctgctgctgctggcgaacggtccgtcggcgacggtcgacagcgaccgaccgaccttctcgcctgctgtgccggctgctgctgcgacgcgggcccgctttatcgcaagggctgccgctgccggcgacggcctgacgcgcgaggccgcgcagtcgagcgaggccgaccggcggaagctcggccggcggtcgaggtgcgcgggcagggcaggtgcggccggcatgcctggggttagggtcgtcgaggacgaggccgacgacgacgagcggcggaggtgtcggaggccgccgtcgaggcccttgatcgacagctgttgctgctgctgctgctgctgctgctgctgctgctgctgctgctgctgctgctgttgctgccgacgtgaggccgagccggccgaagaagacgaagacgacgtccgccggactttggccggctgctcggccgcaccctcgtcgtcgtcgtccgtcagcggcccagcccggtccgagctcgactcttcgcccgagtcgtcctcgtggagctcgagcaggcccccgctcggtgggtccgacatcatgtgccgccagacgtcgcggccggaggaattcgacgaggcccggtcgtcgtcgtcgtcggcgacgtcggtccgccagcccatgacgggcaggttggccgacgacgatgggccaagcatgctggtcccgctgctagagccggacgggcgcggccgcttctgatggacgaacggtagctcgcggctctggacgcacttgtcgagcagcgacgacgacgaggaggaggaagagaagccctgcgaagcgaatgtcggcacggcgagatgggccgggacgttgccagcggcgagcagccccgaacggctaggcgcaaagacgcgcgaggcgcgagggagcgagggcgagcgctcggggacggtctgcttgccaggcagagttgcgaccgacatggttgaccgacctggcggcgtaggacgcttgatcgccgccggcgttgcgaccactggaatgacgccagtcatcgccgtcaccgtcattaggtgagggggcgagcgcgagcccgtcaggaccggccggttctccttgtcgccgccgagcgccgaggtcgaagcgccgctgccagcgcgccgggcgccatagacggtcgcgaacggcaggtcgtccatctcggacgacgggatcgagccgacgctgtcgctcgacgggtggccgccgaggctcgtcggcgacgaagggcggaagacgtcaccccctgcctcgagcaggcgcttcttgcgcgtctggcgccggttctgcatccagatctgaacctggcgtgccgtcctacgcatggtcaaggggtgatgttgacgcgtcagctccttgctcgcggcaccttcgcgtccgaggacaaacagagcgggacgcacatgctgagctcgctggcgatggcttcccggacggccgccgtcggccggtcgtttgcagcaaagtgtcgctcgaggacctcaatctgctcgggcgtcgaccgcttgcggcgcttgcgcggcgcggccgctggaggcggcagaggagcaaccggcgccttcttcagagggcgggacgtcgaaggcttcgccgacagaagcgcgatgtacttagagggcggcgtgcctggcccggccggtagcgcttctgttgtgaattgcggctggaggacgcctgtgctttgagctggtggagcgagcgaggagggcccggcggacgcgacgacgcggctcgggacgacgcgtgttttggcagcgcctgtcgccgatgtcgcctgagtcacgctcggcaggctgccggtgagctgcgtagcagacgacgacgacgaggacttgtcctgctcgaagggggcggcgaggcagagcgaaggcgttgttgcgtccggagtgtttgggccgcctgagtcgcgtcgcttgggcagggcgccgaccgacggccgggtcgagccatcctgcgccgaggacgacgccgaagatgaagcggacatcaagccaaaggacaggagagcctgagaccttcccggccgctcctcgacgcagagcagagccttggacgctggccgagatgaagcaggaggcgcgacgcttgctaccgacggcggcggcggcgcgtcgtcagtcggcgtccttgggagcgagccggccgaggacgacgtcggcgtacccaagagtgactctggcggcgaccaggccgacatgcgtggcgtctgacacaacatgaaggacgagtgtgggagcaggagagggtaagggctgagggtggctggaggaagaggggctgagggtgctggtcgagggtggccggccgagcgcgtaccaacgcgcctgacgttctgcggacgcgcgcaagaaaaaaagaaaaggttcggggaaggcgaggctagttgcactggcacgccctcctgctcgcagagcgaaggtccagacaggcctgacagctcgaggaactgtctgagggaacgaccaatcatatgtctgtagcaggctgctcgggcgagggaggccatgatgcgggctgaagccagccgggacgcgtcacttaggacgctgctgctgcgcgacgccagccacacttcttaatcccaagacaacatgtccaaagctccgcccgcccctactcattccttcaggcccgcggcggatctcgctcttcgctctgccaccagcgctcatagtgctcgccgtcgagcgagcgaaggacctcggcgccatcccagccggcggtgaggaggatccggcccgctccgagcggctcctccgggagggccttaaaccattctgcgccaggaaggaaaaacggtcagcgggcgtgcctatgaaaaagggacgatgaaggtcacccactctctctcttttccatttgtaggtggacgtctgttgggagtcaaccgaggcagtcagcggccggcctggatcgaggggtgagggacggcagacgtacaaagcccctccctgagcggaccctcctgccggccagggagcatgctgtaccacgaccagggctcgcaccgctcccaaacctgaccaccctcgtcgcgccagtagaagcgccgggcggcgtcgttccctggcacgagtgacttgaaagagacgaccttttcgaggtccatccagaccggctcggtggtctggccgagctcaagcgtcaccgcgccctcggtcgtcgggtagggcgagaagagatcattcggcgacggctcggggatgccgcgcgccgattgaaacggggtcgggccggagaaggacgtcaggtgaggcgagagcgagagagtcttgaagtggccggtgagcatcgcatcccaggcgaaaaaggtgatctgcggggcgtagtagaagatgtgggtcgagaagtcctcctcctctgggagtcgatagggaagggaggctcggtcagaaaggacgctggcaggggcaagtcgatgaaggttacgcacccatcgccgaggccggcttcttgcccgtcagccagtgctcgaccgaccggaaggccgggaacgagtgcagcttattaagcgtcgactggcgattgttgaaaaaggtcatgtggccgctaccgggacgtgtcgagagtgagcggcaaagtcagcgctgtcgggtccattgatttctggacgatcaaagggagcgcaccgcatgtacaggaggatctcctgggcgttcgtgctgtgcgtcggctggacgacgtcaaactcgcgcatctcggcccaggggacgagccggccatagtgaccaaggacgacgtcggtgtcgcaccagccccaccagcgcgtcgtcggctcggggaagtagcgctggaagatgggcccgcggaggagccgaaagtgcgaatggatctagcggacgccgagggttagcttctgagaggctagacgtgggaggccgaggtcggacgaacatagtcctggactccacgggtgaggagctctttcagcaccttggccgagtcgtctcgcgagcagccccaacgctcgcaaaggtagtcgcgatggtgctcccagtctggagggaagtcgatcggagtaggctgcgtcagcttcagcagcgataaggagaagaggtctgaggagcgtgaacgaacactcgcggttgctgaggcagacgaagcggatgttgggcccgagcgcgggcccgaggtcgacgcactggccggcttcctccttggcgatgaagacgaggtcaacgacggcccggttggcctcgatcgagcggagaaagaggttgagatacttgggcacggcgaggccggcccagacgacgacaagcgtgatgcggtcggaccggtcgtcaatcgccctcgtcgcgccggagacgagcgagctgagcggccgaccgctgccgggcgcgagcgacgtcgtgaagccgacgaggacgagcaaggcgaggccgctgaggaggagggcgagctgcttgtgcgcgcgcgagaggtgaagcccgccgccggtgacgggccgagagggctggcgggcgtggaaggtcgggcggacgccgagcatgacgtggctaatcgtggacgggggccaagagggttgacttctctgcgagcaagggagggcaggcgtcgtgtcggagggaggtggatggtggaaaagaggatgggtgtcgggctgtcgactgtctctctcgcccgcccgggctctttttcctctcgcgcttggccggcctgagtagacgggtgaagggtcgagcgagggcagaaaaggggctcaaaggggaagtgaaacaggacccgtgggttgagcgaaggaagggaaggccgcgggcaggccggcaggcgaagcggaagccagccagcagttgccgtcgaccaacgacgaccaacagcagcgccagccagccttgagccagagcacccttgtcccccgagcacacagtcacactctttctctcaccagcaaccccttcaccgaccaagcacgatgggcgccgccttctcaaaggccctcggtgcgagcccagtcgcccttcccttggccgcgcgcgcgcgagcacgcacgcgccgccctccgagaggacctcttgggctgaccggccctcgtcctcttgctctcttcggcctctctcaggcaaggtgtttggcaacaaggagatgcggatcctcatgctcgggctggatgcagcgggcaagacgagtcagtctcgccttctatccgtccggggccgacagcaccggttgccctccctctctctcagacaggagctaaagcggcccttgcctccggccctctcttctccttcctttcagctatcctctacaagctcaagctcaaccagcaggtgacgacgataccgaccgtcggcttcaatgtcgagaccgtcacgtacaagaacgtcaaggtacgttcggccctcggctcccttgtcatcgggcttcctgtctcggtcgagcgcgcgcgcgagtgcgcggtcgaacgacggacgagctcgagctcgggcgtctcgtgcctctggcccagctgcccggccgcatccgcacctgctctcgagagccggcttgggttggtcggccgaagagctttgagcaattgctggcacccttgggcggttggcgagctcgcaggcgccgctcgagcgacatgcgacgccgctcggtcagctcgtgctagcctgcgcgaagtcgtctgctagctggcggctcagctgcaagcggggctggaggactgcaattagacggcctgtcgtctgcgctgcctgatgactgccgcgtcggaagtcggcggtccgcggccggggttgcaggggatggcgctcgtctcgcgcggctccgatggccaaccagctcattgacacctgcccctcgatccctcctgcacctggcagttcaacgtctgggacgtcggagggcaggacaagatcaggccgctttggcggcattactacacgggcacgcaggtgcgtccttgcccgtctccttgatgctctcctcccccacctctcgctgaccctctgcaaacgctccttccgcgcctgcggaatcgctacgtcagggcctaatcttcgtcatcgactcggccgaccggcagcggattgacgaggcgaggtccgagctcgagcggatcctcgctgacagggagatgcgcgactgcctgctgctcgtttttgcgaacaagcaggacatgggcggcggtgcgtccctcaccctctctgccttttcctcttgaggaagctctgcttgagctgacactcttcatttcgccctcctctccttctccctcgctcgcgtcccgtctgctcgtccgcccgccgccccgcagcgatgagcccggcagaggtgaccgaaaagctcgcgctgcacaagatgaaggaccggtcgtggtatgtgcacccgaggtacgtccccaacctttatcctcttcatcgcgcaatgtgcctcaaaaccgctcggcgcccgctcgaccgaacgctgcgacgcgatgcgtcctggctccctgatctgcttgctaacgttccgaacgctgcctgccgccctcgccttcccaccgaccgacccacatttgaagttgcgcgacgaccggtgagggcctcgtagaaggcctcgcgtggctcagccaggtccgtcctcgttctcctttcctcctctttccgtccgtccgtcggtgagtgtcgttctgacgcctctggctcccttccatccgactgcccgaccgacccgcagaacgtcaagtcgacgtcgaaatagagccgaacccctggcgcgcatcaatcagatcccttgctcctagctcatacatggcctctcgagtgtcgtcttccttggcctacttataatttcctcttgtgcgtcccgctcgttgctcgacggaagccactcacacgtcctgttcgactggagctccgggctgacctcctgacctcctgccctcctcgtgctctctcttccggccggcgtcgacggccattctcagctccttcccctccctttcctccttccttcgaccttcgctctgcgctctcctccacctccccgccttttcctcccgcgcactcgctcgatgcaccctcggagcggccgaggacctgcgtgccctatacccccttccataccccaccttccctcgctaccgcggctgcgctccgcatacggaccccccttcgctcgctcgcatgcgtgagaagatacgaacaccgctctgctataaacttcactccctccgcctcgccctttgtcccggaccgctcgacaggccaccgctctcgcccttgcgcgagcaccgcgcgcgcgcctcaccgcctccgaagtttgaaactgagggcccgcccgacgcgcgcccgtgtccgaggctcgcccgtgcgacggcgagacgcccgccaaggccgagatggccttgttcgcccgctggccccgtgtgtgcccatgcgctgcatcgcctctcgacctcgtcctggcacttcgcggtcgaccgacccctctcgatttgcgctgattgcgaactcgcatggacctgcatactgaacattcagcgggatcgtgcttccggagacttgcgaaggatcgggcgcattgaggcactgtacgagctggaccatcagcattcggtcgattgagtggctcgccagacattggtgcatgatgcttcggtcagccaagtcgccggtcggtcgtcgttgtgcctccgttcgtccgacgtcgggccgcgaatgaattgccatcgctcggccatgcagagagagagagagccaaggcggaccggcgtctgcagacgcttgcttgggcgcgctgctgtggctcggtggggtcggccaggcccgttaggcatgcaggcaggcaggcaggcagagagagcctttccaggagccggtctcccttgctgtctaccgacgggagcaggaccgcgcgttcctcctccctctctcgcccctatctgcctgtcgctgctcgtctgctcgtcatctcgcctgcccggaccggattttgggacgccgtttctaggcgcgcgctctgggcctagaccaccatacggaggccgcaaacgcctcacgaggcggaaaccttacgcacgcgcgcgcggccggctcgcagcggcccgcccggggcagcgggggcttttcgtctcttgtgcgggaaatcggggcgcgggcggagagtcgaccgaggtcggcccatcgtccttcttcgtccttctctccatcagccatcccagcaacgagcgcatacaccccaaccacagcagcacactcacagcagcacaccctcacccgacgatggccgcccgcgcctcgtacccctcgctcctgacgctcccgaccgaactccagtcgcacatcgccctgcacctcgccctctcgtcgcccgtcggcccgcccgcgcacctcgtcccgctcctcgcgacccacccggcgctcgccgcgacgctcggctttgagcagaacccggcgctctacgctgccatcctcgcgggttcgtgggacattgagccgatcgagaggcgctttgccgctgtcgcctcctccggcagcagcagcagcagcagcagcagcccgccgccgccgctcgccgacgccaaagcccaggcggccgagctccgccagcgctgggcgacgctccgggccgtccgcgagttcggtcaggacggcgcgcgctggctcaacaagcacggcggcggccggctcgccagagagcggctcgagcgtctgatgctcgacgtcttctttctgctgacggagaacggtgcgttcgcccctcctgctcctctcgactcccctttctaccgccattcgccagcggttgccggtctctgccctgatgggtggcgccgctggccgtccggcatccatatccacaccgccttcgccctctccggtctctcttcacaccgtcctccgctcctcctcccttcacccgcccgcgggcgggacctccctcttccctatcggcgccttctcgccaggttgcgcccgtcactcctgatggcgcaggaggtcatgatgcgaggcaaggtggacccaggtgctcagccggccgccgtcgtccctcggggagccgacgtcgctcaagcaccgacgcggaggcttctcgccgcctgtctctccggctctgctgccgcttcggcctcgcgggacgttgccgcccgtgatgcccggtggggcaggagggtgccactgaggccatggccggcgaccccggctgggccagcaagggagcagaggatgcaaagacgacgccgggggtatactccgtcaggtcccgcccgttctcgctcccggcccttgcatcgtccgcttccgtctttctgcgcgtaagagttgtggctgacccactgttttgcttcgctctcgctgctcatcgttcgtttccactgtcattcttcgtgacgccgcccctcactgtctcccttcgcgtcccttttatcgccttccagacggacgcaatttgccgcatgtcttccagtgggcgtgcgtcttcttctcccttctctccttctctctcgctcagccgccgcccgccttttggctcctttacgccggccggcgtctgctgtcgcttgctgccccccgtcggatccgagatctcccatggccgccttgtccaacaaactgacaaccgaccgccttgtgctccctcacagccggcttgtccacttcaacctctcgtaccacacgcacgtcatgctacccgcctcggtctcgcccggctacccgaccgagacgctcggtcacggcctccacaacacgtttagcatgtggctcgacgaggcggccgagcacatgcgcatcgacgctgcgcttcagggcaaagccgtcaggcaggagacggaggaccagacgcaggagaagatgttcgttctccggccgtttgcttttgcgcttcacaaggtgcgctcgcgctttcccgtctcctactctggccggcttggaggctgactgctcgcccacggcctttacagtacaaccccttctttgtcccctggaacaagctcggctttactcagcagcagggtcagcaggagctcgagcaggcggcgtcgacgtcggcctcccggccgccgattccgaccatcatcgagcctccaaccgcgacgcctttggccgtcgacaaccagccggccgagttttcggcccacccggacggcaacgaaggcggcatccgggtcgtccacaagcgcttcggccgcgactggtcggtcaagtcgaacgcgctccacacttcttgcgtctttggcctgcttaacgcgctcgaccgcgacccgcgcgtcggcggcgtcctgaccgactcttcaaactcgtcgaccggttcgctcgactttatctacacgccggccgaagccgcgcgcaagccggccggacggacaaagtcgtttgacccggtgtcgggcacgacgctcaggcggagtctaccgatcgtccacctcggcagccgggcatgggacaacgacgtcaagcgcatgctgctctgtgccgagacgacgtcgcctggcatgcggctcgccgactggcgcggccgcttcgagggcgagtggcagggcagctttgccttcttcgattgttggtccccctccctccacatccttcgcccctccgcgtctgtcgctgaccatttatccacctctccccgctagtcaacggctaccgcgacatgattggcggcgacgagcaggccctgttcgagaactgcttcggccagcaaggccaacagctcatcctccacgaagaggtcgtatatgtcccacgtcaacaactcggcgggaccggcccagccctccactgcggcttcccgctcgacgcggccgagccagacgtcacgcgaccatgcccgtacggcgaggaggacgtgccggacgaggaggggagcgaatgggtcaaggagatcaggatctacgggaccgggcggagcaactggggtagcttcaagttgaccggccgcgtccgggcgtttgacgggctcgtcatgctcctcaaggagtacgctgtgcgtcttcgcttttctccctctcatcgcctctgggcgctcattgtctcaggcgtcggtcctgggcggtgcaaccgacggccagtgctgacggcttcgccccctcctctccccagtccgaactgcccgaagcaactcaggcgacgaggggcaactggctctatcgaggctacgtctcggccgacgcgcgtttcattggcgcttggcgcgacacgttcagccccgaagacgtccgaggtacgttcctgcactgcctcccgcccgccggccacagcagcagcgactaacccttaatctcaggctacgagggcccgttctgcctccgaaagcaggccgaggcctacctcgtgcctgaggccggctcggccgtgagcgacgccgccgcggccgcgtcggtcaccaacctgacggccctccggcctttctcggccggcggctcgcgcaacgcgccctttgcccgggccgaggtctttgcgacgaccggcggtgtcgacgcgctcgcgccgctcagccagaaggtgagccggccggccgccgttgccgccgcgctcatcgctgcgaggccgatgccgagtagcacggtcgactggcgggcccaccagcctgagattgtcgaggcgtcgtcgtcgtgcgatccaaacgacccgaacgcccggaggcttccgttcatctaccctggcttcaaccgcgacgagtttgccgccggcagcacgagcgacgacaagccggctgtcgctgatcaaggtcggttgcaccgtcaactctttgggaccgagatcggcgctgacctcgacccgctctcttgctagcatccgaaggctggggcacagccatctacaaccaagtccatgcggccttccagtcggccgacgttgcggccactcgtgcgcgccgccctcccgcttcccacgtcacccgcgccgacccgatcggctgacgccgccagcggggcgacgttccccttcccttttctttctctcttgtcagtcccttccatcgccgcgacaggtcgaccggtcgcgtacgccggaccctatgggatggaggccctcctcaccccgccgcccgacgatagcagctcgcgcaagcgccgggctccctcccccgagcgcgagatgaccaaggccgagggcaagcgtcgcgaatttatcaagccgccgcaatgcaatcggcagcggcacacgtcgatttacaacggtaacgcctcggtcgcgtcggttgtcggcgagtcgatcttcgaacacgagtgcgatgagacgctcggcaagccgcagtgcaagccagaggacaaggccggtcctgccgagaaactaggtgcggctcggaacatctggtggcctcttcggtctgccctgctgactctcacccttcctgacgcccagagcgcacgtctccgcaagtcagccgtcgactctcagtctacagcctgcttcgatgacgcttaatgagcctgcgaggctcacatcactttcttctttccctcccttccctatctctccccatctctttactttctagttttgggttcctctggttatcgttacacgctgcctccttccctgtctgctgtacatcatgcacctgcttctcacgcgcgagatacgtccggtcgtcgtcgagcggtcatctagaaatgcaggtcgtgagggaagggaggcgacgacgtccgaggggggcgagccacgggcggccatcgtcgggtgtgctgctgtggccaggggtgtatgcgctcgttgctgggtggctgatgagagaaggacgaagagggacgatgggccgacctcggtcgactctcgcccgcccgcgctcgatgtgcttcctctatcctgctcgggccgctgcgagccgaccgcgcgcgtacagtaaggttttggcgttcgcggcctccgctggtgttctgggccaaagggtgcgcccagaagcagcctcccgcaagttggtccggccaggcgagatgacgagcggacgagcagcgacagaaagaccaggacgagagagaggaaggagggacgcgcggtcgcggcgcccgagggtcaggaacgcccgcacggaggtggcaggaggaggaggggagaagtgttcaagacggcgagcgagacgaggtcgatctggagggcgggcgccgccaacggaacagagaccaggctgggcgcgcgaagggcggtggatgctgagtgagagccaggtggtacaactgcttgaccggaggctgggtcaacgacagcaacagagccctgggcagatcagagcgcaaggcggagaacgtaccaggaagtgggtggcggtggagcggtgtgggggcatggatgtgacagggaggatagtcatacaatgagaaggtgggtgcgtggagtctagagtcggtcgaggaagcatcgccgtcagtagagtgtttcgtcaacagcgagcaagcgcagacagcacgtacctgaagatgctgcggttgcgaagagcgaggagacgagagttgggagcatgtgcgcgcgaccgacgtctgtgcgacgacagccgaacgtggaggggaaggagggtgggtcttctgattatacagcgagagagacgaaggcaaccgagcaccgagaagcgaggaagatgtggcggccgggcgagggaggacgatgcaagggacgttgagacaagagctgcaggccgccgacgtcatgtcgagatcaacagcgaggaaagtttggttcttctcaaggggccgatgatggcggcgaaaaggacgacggagtcgtgagagaggacgcggccgaagacggcactatacgcttgcggacgctctcgagccgcttttgggcagcggcgacaactataaagagaaggccgagcagctcgtcagcattcgacgtcacgctagacaagagcccgtctgcaacgcacacttctcgaccgacatgcggtcgtcctcctccatcagctgcccatcgcggatcgtgtcgtcgaggatggccttgaagaggtaaacggccgtgtcgtaggcgcgttcggtgtggaccggatcctcgctgagcgcctcctggatggcagcattgcgccactgcggtaggagtggggagacggtcaaagtcagctcgcgctcaataagtacttgagacggaagggccgcaccagctccatagccttatcgtaaaggaggcgctcggcaagcgcagagacatcggccggctcttctgtgcaacggccgcgtgcaaactcggccttgtctgagcagtcgttgaagcgcgcccggaaccattggacgactgcgggcagcgcaagaggttcggtcagcagatatagcaatctcaacgaaggtgagctgaatcgcggacgcaccctcgttcaggtcggcgctggcttcgattccgccgtcgcgggcctgccagaagctcttggcggcctccatgcccttctggaggaaggcaagcgacttgaggtagagcgcaagcgcttcggccgcgacaacgtcgagccggaagaacgagacctcggactcggacgtcgagttgaaggaggatcggcgcctctggaaagcctggctctgggcgatggcggggctctgcgagagctgcggaaagccggacgacgaggctgagccgggcgagtctgtgttggacgtcgcgccgatcggcgtgcctgcgagaccgctcgtcgcgcccgaagccgcgctcaggatcgcgccgatcttggtgtcggcaaactcgaataagacgaaggccttctgagcgaggtcctcgagctgattgatgagcgactcttcggccggatcggcctcgccagactgaatgagggccttgcgtcgtgcgctcgcccgagcgacgactccggcaccggcggcggcgatcgaggccgatgttggcccgccaaagagccgggcagatgcgagcgagatggctcgcgcgagaacgccgccacttgacggcgatgagccgtaacgctgctgctgcggagccgaggcgacgatgccgagtggcgaccctgcgctgccgacgtgctgcggcgtcggccggcccgagaggctgctgtacgacgcgggcgagtgtgggatcgagattggccgcgtgagggacgacgtgtgcgacgcgtgcgagtgcatgtggtgcagtggcgacggccggctcggcgaagacgagatcgcaaacggcggcgtgatcgacagcgcaaacgagttgaccgactggggcgacgtagacgggccaccgccaccaagcggcgggctgctgcccgagacggcagagttcggccgcgacagcgtgagagccgagagcggccgtgacagcaggcttcgtgagctgcgtcggcgggtcaccggcgacacgcgctgagaagccgcgtcgagctctgtcaaagcaagaagacacgggtcgtcaggcccagccaagagcaggcgaggagacggagggggacacaccatcggcgagtgaattgatctcgaccgtccgcttctcgatgacgacatagtcctggccagcctcgtcctcctcgtattcgaacatgccgaccgaagacgaggcagtcgtcgagccctgccggcggaggatcggccgagcctgcgagccggcactcgcccggcgcggttcggactgcgacggctcaccagcgatcgaggaccgactcgcgatctggccgaggacgtagcgcggctcgaagctcggctggcgcgtcatcttgccctgcgacgaggctgagccgccgtcgagctgcggacgctggccgagcgccggcgacctggcgacggcagacgtcggcagcggcggtggcgacgcacgcaggggcgagcttgtccgcgcagcggtcgagatgggcgaggcagaaatgggcggggtcgacagcagcggcgactcgccgacgggtggcgaggctggcagcggcagtgcgaacggcggcaatgacggcgccggccgggtcgcgatcgggatcgtgcgtgtcgacgtcgtcgacggcggctgggcgcgcgagatgagtcgaccggcggcagcgacgcgcgaaggaagctcggacggagctggcggcgtcgaggcgttcggcatcattgacggcggcggctgaggcagggcgacgacgggctcgtcctcgccgctccggctcatgtgttcttggtaggcggcggcgatgtcggttcggaagaagtcggcaaagctgatgcgctggaccgggttgcgcttaagcaggcgcttgatgagcgccttgacgtccttgccgaccggctgctgagggatcccgaccggtgcgccgtctgagccgacgctgattgggttccagctcgacttctcgtcggggaagcggatgtgatcctcgccgcgctcaatcttcttgagcagctcgacgtggttctgcgccttgaagggcggccgaccgaccgacatctcgtacaggacggtcccaaccgaccacaggtcggccttggcgtcgtacttctcgtagcgcagaatctcgggcgccatgtagagtctgcgacggagggagaggcgccgagtgagaaaagtcagcaaagcctagcctgtgaagctgatcctcgaagcgaaaacgcacggcgatccgcaaagcgtctcggccatgctcgcaccctcgaggaagcgcgcaaagccaaagtcagcgaccttgaggaccgggatgccgaccgggtggccagcttcgatctcggccgctgagggaggctgcaggagcaggttctgcgagggcgcggccaaggcgtcaagatttgtcgacacgcagcttgactggcgcatgaagccgacgcacctgcggcttgatgtcgcgatggatgagattctgcgatcgaaggaacttgagcgccgaggctgagaaaaagggcctcgcggtcagctcacgtcatgccgacagcagatcggaagtctacagactgagctggccgagaaagcacttgacgacgacctcgtcgaggccgccctcctccgggtggatccagaagcgcttgggcccgccctcgggcgggacatactcgagggtcggcagccggccgcgcttcttgatatagaagctcaggtcgccacccgagcagtagtccatgatgaggtagatgcgctcgtcaagcttctgctcgaggtcgaaatgcgcgcaagcagtcagctcgaggaacctcgccggtcgggtcatgacgtctgcctaagacgtacgaggcagtcctcgaggccgacaatattggggtgatggattgccttgagaatcataatctcggcctcgaggttctcgagcagcttggacgtcatcttggcccgctggacgaccttgatggcgacgacctcgcgggaagcctgagacaagcgcgcgcgatgaggacagtcgtcagcatcagagcttcgccagacggcgagcgcacgcaacgtcaagcatgccagcagagaaatcaggccggctgttggtggacagcgagacgcgcgatgggcgagccggccagcaccggccagggtgctgagactgttacccctttgactcatcggctccccgcgagagcgagtcgagacccggccggccgcagtcgccgccggcccgcactgcccgaacagcggctcgcgcgcccttcgaccagcccctcccgggtcgaacgcgatggggaaggatggaggcgccaggaagagggcagactcacggccttgtagcctcggaggacggtggcgaagctgccgcggccgatctcgctcccgagcaggtagtcgccgacccgctcgcgctctcgcggcggcggatgcgaatgcgacggcggcggggcggccatggcggcggcagcggcggacggtccgctcaggatgggaggtcggatgctcgctcctgggctaggcgccgacggacgaacgacgcggtgaagacggtcgggtggtggtggaggagggggagcaggaggcgcgggcaacgcggccgggtgacccgggctcaatggagggcaggcgggcggttgaggaggaggcggcgggagagctggctgacgctgcgagatgaactcttgggcgttgccgacgcgggcgagcaggtggcgattatcggctaggtgggagggagatgggcaagggggttgtgtgtgttgggggaaggaggcccgacggtctcggtggacgtggccgggtcggtcggtcgacgggcgaggggaggcgcagcggccctcgtcgagcttgataaggtcgcaacggtggccgggccggctggtgggtgtgagttgcaggcgatcgctgctctcggtggggtatggcgtgggtagtgcttaagagaggtcgcgagctcttgaggtcgacgttgggaggagcgagctgatgccgtgtaggctcggtcaggtcgtgctgccggggcagatggcgcgagcgagatgatgaccgacgacgctagctcatacacctttcaatctcgacccaagctttaaatgatactgccgcctgccagctcgacgacaggcagcctgagcatgagggcttgcttgctgtcgacactgctgctgctggcctcgtcagcggccagctctggcgtcgtcggcagccgcgtccgggcccggcgctgcgggcaatcgaacgacgcgccttagcaaccggcgtgcgccagcgacagccgaccctggcaggaccgtcgggagccatcgcaccggatgcagggccaaagccgggcaagcatgacgacgagtcccggcctggcgtaagctcggaaacgactgccgcttctctcgagcacgtcgcgccgcctgcccacttagagccgacgcgggagcacgaaggtgtcgcatggatcacgaaaagcggttggtgtcgtggatcaaagggtggtcgttcaggtcataaagtgtggtggggaatgcaggtgggatgctctgtgcaaagcgctttttttgaggagagaaaggcataccgggcgaaggtcgggcaacctcaatgctgatcggcgccctggccgtagtgcaaggcagcgcgcgagccgtcgtcaaactggcccgagctgtcaaagtggccgccggcgacgtcgtcaccgaaaccagccgccgccggcgggaggtagaggagctcgtcggtcgtgggctggaaggccggcggcagctgctcaggcgtcgccgaggtgtcgggcgtctggtcggaccgagggatcggaggcttgcagtagaccttgcggtgctggaggacaagggttcgaagcacgaagcgtcagcgcacgagacgagaaatttgaagtgacgagcggctcgagatacgtacgcggacgagcgcatcggcgcgcgagaactttttgttgcaggcctcgcagctgtaggcgatttcggaccggggcacgtggaccgtctcgaaatgccgcttgaggtcgaacgcccggatgaagatcttgctgcattgagcgccggtgaccgagtcgacgaatgagcacgggtactggaccggctcggccggcttcggcttcttctgccgcgggcctgtccggaggatcggcttgggcttcgcgggtgggagcggcggcggcggcgggagatccttgatcggattcgagagcaggacgctcgagcacgcagcatcgagccctccgttgtcgccgacgagactcaggttaccggccgagacggcggcgatggctgccgcaaagtcgtgctggtcaagcagcgacgtctgcgagacgtcaccatcggccatgtgcgagtaggacggagcgtcgtggtcgtccgacatgttgagctcgtcgggcagggggaatgcgtgcagaaggtcatcgccggggtcgccgaagccgccgtggtcgtgatgctgggtgagctgttgcacgtgcgcctcgccgtgcccgtcgatcgaggcagggatgatgtcggcgggcgactggtccgggatcgacgagaagtcgagctgcaactcgccgtgcgggtcgtcgtccgagaagaggccgggatcgatgaggtcctgcatcgagctgtcgtgcgccagcatgcttggcggcgggggatgcggctcatcgtcccgcccgtcgtcggtgtccttgcgcttggtgccgctgctcctcgggctgaccgccgtcgacgctgtggccgggctgatcgcggtcgacgcagcagtcgagctggtcgccgtcgacgctaccgggccctcctcgccttccatccagcccatgagccgtatgcaaagtcggacggtctcggtgtccttggccatctctgggaagggacagtgcgagagccagacgaggacctcgggcggcgagagcgtctgctcgaacggcgatccgagcgccgggaatgggccgagcggcttggtcggcggcgtgccatggacgaaagggtagacgcgcgcatactcgtggacggccgcctggatgttagcgcgctcctcctctggcgtcaacggcaccggttccggcaccggctcgggttcgggctcgggcgcggcggaaacgatcgggtccgagaagatgaaattgccatcgccgaggatgagggcgaggtcgtgcaggcttgcgctagcgttcgagtagtcctcgccggccatgaagcttgggaaggctggctcgttgatcggctgcgagggcgggtccggcggcggtggaggcggcggcggcggcgacggcggcgcctccttcttgcctgaataggcatcattaggggcattagtatcgcagagaggcttctcgaaggagaagagaaaggaggacgaacgctgcgggtggctcagactctcgacgacggcgagcttcttcttgcttccgcccgtcagatgcagccgctcgtgccgcctgcaatcgaactgccggccaaagccccggccacagacctcgcagtggtagggccttcggacagacggtcgggcgcaggggtcagctctggctcctcgtcaaatcggcacacctgctgcgcccttttccgaggccaggcggcgggcgactcactgggctcctgagggcgatcaacggcgtgacagaagagcgtcagcgacaagccctcaacacagttgaaaggcagctaaacgcaccgctgtgtgaccgcagatggccggccaggttgtgcgacctgtcagatgagggaaggcaccgtcagccacgcggtccctcctttctcgagcagctcgaggcgcacctcgtgaacgtcgccccgcagttctcgaccgggcagatgaagcgcggatcgaccttgcgccgggcctcgccggctgcacgggctcgcttcgtcgtctgcggcttgcctgggatagcctcggagcacggcgtctggggcgagtgcgagccagaggcttcgggctgctgcggctcgtgcgggtagtgctgctcgccgccgtgctgctgctcatactgctggtgctgctcctcgtgcgactgctcgtactgcaggtgctggtcgagctcgagctcgctctgatgggcgtcccagccgccgtcaaagtgctcgtccatcctcgccgagcggcggcggcggcggcggcggcggcggcaggggcgggctgcgagggacgggcgctgctgtccaatttgaatgcttcctctaggtcagttcctgtccctcgcctctcacatgcagcgacgcgaccgacctgctgctcgaggtccgcgtcggttccggggcgtccacgcgctggccttgccgaaagtcggtcgcgtcgtcgggtcttgggcaagagcggtgaaggttctctgtggctggtcggagggagcgccgcccgttgagccgacgcggccaggcgcagcgggcgactgcacagcaacgcccagagatgggacagcagcaccagcacaacgaggctgtggcagccgtctttcgctcaatccaccatcacctcaggagacgcctgccgtaaagtgacccgccgctgatgtcgtacgtccgcaaacgtacctgtcgtatcgacattgccgggctgacgctctttggccgaactccctccgtcatggccggtcactgcgcctccccagctactcgcccttcagaacgaccgagctggccggcctacatgtctcgatgcgcgaccgcgagctcgtcggaggccaaggaggtccgtccagttgagcttctgcatctcaaccattccgctgaagcatcgggccttgtcgacctcgcaggcatcaaggtcctccaccatgtcaagccgcagacgcgctcgctcgacctctcgcacaaccacctgctcggcgccgacggcctccggacgatcctcggcgaactctgtcgcgatggcgccaaggaggaggtccagctcgagcgcctgctgctcgtcgactgtgggctgggcgggccaggtacgtcattgcgccctgccgccggccgagcactcgttcctgaccgacccgttgtcctactaggcaccgaatggtccactgcctcgcttgagctcctcgcgctctacctccctcggctaccgaacctctcagagctcctcctcaccaacaacgacctgacggtcctccctccaatcttcaccgctgccgccctcggccacccgcgcctgcgcacgctcggcctctcgacaaacgacgcgctcggcctcgccttcgacggccaggcctacagcccaatctacaccttcctcgaggcctaccataagcacgcgcttcaggccggaccggagttcagtctgcgcgtgctccggctcgaccagacgagcctcgatgggaccgagctcgacgacgtcctgctgcggatcgtcctgctgaacgaccgcgggctcgaggagctcaccgtcaacggtaacgacggcctcggatccgaggtcctcgacgacgtccgccgggcgatcctatacggcccaccgcccgaaggcgacgaccactcgctcgccgacagtggcccatcacggcactcgtcgacgggcaacgcgttcctcgtcaagctcgagacccgcggctctgacagtgccgtctgggtctcgatggtcgactcgatctcgggcctcgtcacctcgcacgctggtctgccggccgtccagcgcgtgccggcgccagtccctcagccgaaagtcgacgtctcggcccggctgcacgccaacctgctcgaccgctctctcgcgagggacggcgccatccagctcttgcgggccagtcggaccctcctccacgccttcccaagccaaacggccagcgggtccaccgtatcaccgatcgccagcggatcaacctcggccgcagcaacgacccgcccgtccgcgcccttccgcctgctcgacctccccgaggagatcctctcggtcgtcctctcgcacgtccccgactctggcgcgctcagttcccgtcagacggcggccgtcctcgctttcgcgcgcgaccggacgacgctcgtccggcccgacgaggcgccgtcgagaacgaggcgacgcaagagggagcgcgaggactggctgttcagcgtgggcgcgtggtgggccgagccgtagacacgtgacagatatatggcccccttttcgggaatacgcgagagcaggcagtgggcagaccagcgcaggaggttgctaagcagttgacgggcgagcctgagcagcgagacagccttagatgcaacgaggaccagcctgtcgctcgtctccctcccagcacaccctccctcgggagatagcccgggccgccccttctcctctctccgaagcccttcgccaagccctgcccgcccctcacgagttgcgtgctgagtcatttgccatatcgtgaaggggccggcttgccgaaaggggcgagcagcggatggcttaccccagaggggagggaggaagggtcgaggcgaacaaaaggcaaagcggggaggacatcgattccaatgaaggagcgagccgccgctttacttgcggccggcctgggccttgacgaccttcttgacgatctggaagaggacgagcagggagggccgaggtcagctggccggctctcgtcttgggcctgaaccccttccctagccggcaggacggaccttggcctcctcgacgaggaaggcgcggagcacgcgggtccggacgcaggtcgagcagcgcgagccgccgtaagcccggttaacggtcttctggcgcttcgagagcgtagcgtactcccggggccggagggcagggacaccggggagggcggttccgcagtcgccgcacttgggccgcgaggcaatcttcttgaggttgtggaccacgagcttgcctccgggggtcttgacgacgcggttgcgggccgacttagtgttgtacgacttgcgcgtgcggagggtgactcgctgggccatttttgctgagggacgcagagtagataggacgggagggtcagtccgggctgctcgctcggaacagtggtggagtggtgggtgggaggaggagtgctcggggtcgggtcggcggcgtgctcgtgattgggtcggcggcgggtcggcgaggttgaacggcggcggcggtcggtgctgtttgtcgttacgacgagcgtatcctgcactgcggcgagcgggcagagcgcaagcaggagcctacaggcgtgcccttggtcgacctgagcagcctgcctgaccaaagcgacccccagccgagcagcagcccagcccaggaggtgtcgctccgcccggcctcagctgcggcagcctgcctcttgcgctcctctcccaaagcagcgtgatcgggtagagctctcggctctccccgaccactgaggcaatagcctccccctctgccagcgttcatgccgccgctcctaggcggcgtgctcggccggcgctcaagcccgtgctggctgaggtccgggcctgctggcgctcgcccaggagctgcgggacctccaatgcccgcaccggagtcgtttgtgtcgatgtgctggatccgtccggtccccgagcatgctggcggtaggtctggggagtgtgctgtgctgtacatacctgatcttgacgggtgaagaggcggacgactaggaagggagcaacaagtcggggacgggggcgagctccgaggcggccttcgcgcggggccagaagcttgacccagaacttggggcctgagagcccaaattcaacagcgtttcatcagggtcggtcggcaacaggcgcaagctcatccaagaaatatcaggcaggaaagcatgcagacgtccagatgcatgcagtacctgccagagcactagatctcgagtgtcggagtagcgtagaggagccctcctttgcaacggccagcagcagaagggcgagcgagcaagttcaaagtccgctctcgagccggccgcgcgcgccgaccaatttcgctcgtgcgccgccgccttagccctctcaccaaccatcctcgtgcgtagccgctgctgccataccctttcgtccggacaactcttgctgacgaccctcctgctccagggcatataagcaccagacagcccccggcttaaattcgtttgttgcagcccttcacaatggtgagcccagccgcggtccttgacgtatttggacggaggtcgccgagccgggagctcgggagggctcgtcgcttgcgaagagttcggcctgtcaaactcacgaaggcaggacgaggaccaggggccggctggtgtgccagaagcactctcggagctgggctcgagggtcgtcggtctggcgcgcacagcagctcgacttgcatcgtcctgtgcctggtcactgaagctcgacgacgatgttccaccgatgccctagtcgtcggctggacgcgctctgttttgctccccggtccagcgcgatcaggcgctgtctttgtccagtcatccagccaactgacccgcttccctttctttcctgcagtccgagctcgccgcctcctacgccgccctcatcctcgccgacgagggcatcgagatcaccgccgacaagctcgtcgctctcacctcggccgccaaggttgagctcgagcccatctgggcgaccctgctcgccaaggcgctcgagggcaagaacgtcaaggagctcctgaccaacgtcggctccggtggcggtgccgccccggccgccgccgtcgctggtggtgcctcggctgacgccccggctgccgccgaggagaagaaggaggacaaggtcgaggacaaggaggagtgcgtacatgcttcggcccgtgttctcgtcctctgcgcgcagcgagctgacccgtccgtctgcgcctcctccctccccgcttttcttatttcaataggtccgacgacgacatgggcttcggacttttcgactaaacgccgcgtctcgaatagtccggatccttgggatatgtgtgaccgaaccgtcctcgttcaatcgagcgtacggcccgcggatgacatgtttccccacgagattcgcgcgcgccctagaagagagcgagcagcagggcgaccgcggggagcaagagtaatcaggccttcatcgcggtcgtccggcagttgggtggcggtcgagaggcagagtggtctggcgtatctgctgggagcaaggcgacggtcagcaagggcgggcgggcggaggggcagaccagcctatcggggacgtacggcatgacggcaggcgacagatagctcgggctgctcaagctgagacggatcagagctagggcaagctgaggacgagaaggcaagatggtcgtctgaagggcaggaggacgagacgccagctgcgcgcgcccgctttgcctcgtctctgcgttcgctgtctgtctgcgcgcgcgtctgtctgctcatgccatcgcttcgcgggggcatgtgcccagccattcgcggccgagagggtgggtgggctcgacaaaccagccctgcaaagagcgagccgagcgtcttagagcgagtctgcggagagcgatggctgtaggagaggcgttcgcttcgttctctcgcgcgcgggcgatgtcgcgctgcggcctgcgccttgcgctggtcgcgtcttgcagcagtctcgtgccgcagggcagccggacgactccctttgatcgccttctcgagttctctacgactgtcatttaagaggcgctgcttcccatcgtgcctagtggaccgccctctcctccattccgcgacgtcgccttgggcaaggtgccgctcagcacgtgtcggtcggttctgtcgcacgggccggaggcttcctgcctagcctccgacctcacctcgggcgctgacgagcacgatggccgaggacgtgtcagcttggccaacccgcctgacggtcaaacgagatgctgacaagcagcgacgagcagcgacgacgagacgtcgaagatgcctccgtcgagctcctgctgaatactcgcggccgtgccagctggcagctgaactctggcggcttgctgacatgctgacggccgttcccagggttggtccgcccgactcagctcacccttcctcagcagcatgaccgagcgccgcccgtcgcaaggcctcgcctgagaaggcagcaactcgaatacttataagggaggccggcaggctcgtctcttctgcaacaccatctcgcccatcctagactcgcccagtcctcctccttctcaaccccgaccaacctcccctgtcccgaccagcacctcccgtctcatgtcctcctcttctgttctcgtcaccggcgcgaccggcaagcaaggcggcgccgtcatcaaagccctcctcactgccaagcacgccggctcgatctttgccctcacgcgcaacgcgaactcggcagcggccaaggcgctgcccgaagccgtcactgttgtcgagggcgacctcgacgcgcccgaggccgtctttgagaagttcgccggcaagccggtcgacgtcgtcttttcgatacagcagccctggggcggccaggaggccaaggaggtgactcagggcaaggtgcgttcctgtcggtctcgcaccaggtcgtaccagcggtctgagcgccgctcgaccgcctgcagggtctctttaactcggccgtcaagcacggcgtcaagcacttcgtctactcgtcggtcaaccggcacggcgagggcccaacggccatcccgcatttcgccagcaaggccgaggtggagcagcacatcaaggccaatgccgccggcaagatcgactggacgattctccgcccgacgtgttttatggaaaactggcctgcgcctggagacccggccggagccttcctcggcgcttgcctcgaggttggcctcgcaccgacgaccaagctccagtttatcagcgtcgccgacattggcaagctcgccgcgctcgccatccacgaccggacgcgtttcgccggcaaggccatcaacctcgtcggcgacgacctgacgtggcccgagatccagcagaccttccgtgaggctgccggcatcgaggcgccgacgatcccgggcttccggctggccaacgccgggcacgagatggagaccatgtgcgctcctccatgccgttctcctcctccgccttgacgagccgctgactcactgctgctggcgcgcaacaggatcaagtggttcgaggctgtcggctacgatgcctcgctcgacgagtcgcgcaagctcttccagcccgaggacctcgcgtcttacctccgccggacgcacgccaaggcgacctgaggaccttcgttgcctccccgttgtacacctgcccgtccttcgtcgattatgcccccttctccttcatgcttggcggctcggtggtacagacaaggataatttcatggtcggaagggggcgagctaaggacctgtccagcgagggcgactgcgcgcctgaaggcaggctgcgcgcgccgccgctcctctcctcccgacgaccacctcgctctcaaagcagagccctgctcgtaaggaaggccactaggtgagtgggagaaacttctccccaatcctatgttgtcttgagaggtagatgggctcttgcggccggccgcgggccagttgccatcgccgttcccgcccgcatgggagcccggtgctcgtccttacgccctctcacacgagacaggtctgtcgcgactggggcgttggcgcatcctcatctattgctccttcttaagcgtcgccgtccagaaagccgtctgcagagtcaagcgagagggagatcagcgtccggataagtgtccgccctgcacgccggtcgtcgttgaaccgacctgatactcgtaacgaagcatgccctcgccgttggccgtgtagccggttgggacgatcttctcgtcctgctccaagcgtgggacttcgtacatcagcgccacgatcagtcaatcaggtcggccaaagggcagtgacgcaccttcaggcaaaagcccaactcggagcagagcgccttgacctcgtcgagcgagagctcgatggagggctgcgggcgagggttgtgcgccagaggtcagcgaaagaaggccggcttaaaccagaaggtacgtacctcgttcgtaccgttgttctcccagtgccaaagcaacggcccgagattgatccatgttccgccgggggcgaggcagcgcttgatcgtctcgaggtactcgataacgttcttggccgtgtcgataaagaacgaggtcgcgatgacgtcccatttaccgtcctcggcgccgtggccatagacgtcgaggaagtcgccggcaacgagcgaaaagtcgctgtccttcggcaggtcggtcgggctgacgtcggggatcgacaccggccggagcatcttttcggtcgaaagatggtttgagaacgagtggacgtaagggtagagcgtgtggctgttgacctcgggcgttaggttgaggatgaagaaggacgggaggagcatgtggaaagaaaactcgttgccctgcgaggcgaagcctgttaaggaggaacagagtcagtcgtcggcaagctggtgcagcgacaggtcgagcgcaccgagatgggcgatctcgtatgcgagccgcgcgaggccgacgcccggagaaaggaccttgatcttgcggctgagagtacagcagaggttgtcttcagcgcagcagcaagcggtcgagcggacgcaggcagacgcaccggtcagcgtcaggcacgtccttatagatggttgagagggcctccaagatcggagcataggctgtgtcgcgctctggcttgccctagtgagtcagacggcggcgaaaggtcagcgactgttcagcagagcagggcactgggtgttcggctgcacctcgacggaccactcgcgtacgacctgcttgagcgtcgacctgcagcgtagaggtcagcgctataggcgaccgcagatagcctaagacgcacctgatcttgtccatgtccatctcgctcggcttgggcgctttcttcggcttggacgacgacgcctcggccaccaccgccggcttgtccgattttggcgcagagtgcgagtgcgagtggtgtgcgccctcgttgtgcccaccgcagccgcttccctcgccatgcgagtgaccgtgagagctcggaggcatgggcgaggatgtgtcgtactcgtcgtcggagccgaagtctggcgggagcggagcgtgagtcggcccgacgatcagaagcctgtcactgccaggtagttggcaagatgaggacggacgacgcaccgtactcctcctcctcctcctcctcctcgacttcctcagacgacgtaagcaccgactgaacttcttcctcctcatccgggtcggagaacatgccggtcccgacctcatcgacgatgtcgcgcaggaagctagcgttggccgcaatgcagtcgtcgaccttgcgaagcttctcgcggtagccgagcttgacgaggaggtcctgctggagcttcggaagggctggcgacgcgcatcaagtcgtcagagcagggtcagtctcggtccgcttgacacctggaccgtgacgaggacgaagcgcagcgccgcctcgtcgagcagacgcacacaggaggtccttcagccggcgatggttggccgagagctgccaggtgcggaccgagcggcgtcagtaacactgatctcatagcaggtcagggccgtacgcacagagtgcggctcgtagtggtagaacgaggcgacgacgcggtcgaaggcgagccgctcctgcttttgggctgagagctcggcttcggccggcgggccggcgtcgtgcccgtcgcactcgacgccgtcgtgcgaaggcgagtgcgagtgcgaaggttcggtgtgcgagtggcccccgtggtcgtgcgcgtgtccgtgcgagctcatggcgtgctgctggtcagatgggcaggtcggagatcgtggccgtcggcggaaagagcgaaggacgagctcgacgcgtgccgttcgacgggtcgccgggaccctgtggctgctcctcgacgtccatgcacgatgagcggccaggatgagctcaatccctagtgcgtgcctctctgcaaccagcgagtgtgccggcagtgctgacgcggcgacgtctgccctcgccgttgcagcgcggccaaccccaagttctcgccgctcgaagcggccgtgctttgggagtacctgaagctgtcgaactcgatcaagcaggtgcggcggtttcggacgaaagggacaagtttacagctgacgtctgatttgtcctgaacgagtagttcaacgagatgaagcgcgatccggtgcagccgcacgaccagctgctcgccgtcttccgagggctcgagaagaagatgggcctcgtcctcacgctcgtgagtatgaccctcggttccgaccgacccgcgctgacatgctgccctggctattcttgtagtacaaggcctcggtctgggcgacgatggtcgacaccgagcaggacatgctgaaccgccaggcggaggaggctcagcggctggatgcccagggccgagccgaccggggccgcgacgcgtcgtttgacagcgaggccgaccaggaccggaccatccaggaccaccacgccttcaaggggtggtagaggtccctcgacgactgacgacaagcagctcagacggcgtacacctcttcagaccggattgacagccggtggcatacagacgcgccctccgagggagggcaagcaagcgacaggctttgacgcgtatctcacgacctttacgacctcggttcggtgcagcgtgccggtcctcccatgacctgcgagcacactcctttagcgaccagacatctcgtcctttcgatcctgcccaggttgatgaagggagcaagcgcaaccgactctgtcttgctgcgccctctctcagcctcaaagcaccgcgccaggctcgccgtagtcgagacgactggcggaagcgtcgaggagtgtccatctcttcctcgacaaccaccatcacctcactcgcaactgctcttgcttctttcaagccgactgccgtgccaggtcagtcacgatactgccagcttgggcgttgctaagctcaaggctgatgggctcatcgcggcgccgacgtcccgcaggttgcagctgcctcctcgaccgcctcaatcgcgcagcttcagcagcgcttgccgaccctctgattcggatcatactcgtcttggtgagctcctagctgcgcagtaagagctagtccatctgtcgctgacgagcgaaaccccgcgctggcttgtgaggcgatcagcacctggttccttcctccgcccgcagccgagccctctcgtcacatactgctctaggcgcctggatgtcgttcacctgtgcgcgaccctttgtcaagcagagctgggtccagctcgcttcagatctccgctgacgtgtccatgcgatcacggctcgtccttgctctctagccgccttcctgggctcgcctcagtacgcgccggcggcgagcgtgccgctcatcaagtcgccgtcgctatacctacctcgaccggtgagtacaggctctccagccggatctgcctcactccggtcggcgcagcgcgggctgacacgatggctacgcccatctcagatcgagctcccgccagacatccacccgctgccggaggacatctcagcctatgtgcgcccaccgactcgccaggctcgtctatgcagatctgtacagatgctcgtcgaaaagaagcggctgacggctctaccccaaactgccttgactcgcagttcgtctaccctttcacgctcgagcctcatgtgctcgagcactctcccgtgcatcgcgcccaggcccatgcgagccaggcggcacacgtcgctttcctcctccggcgcgagactgagcggcacgagcgcgagcgcaaggagcgcatgcggcttgcgccgggctgggctggagggcagggactggtgcctgtccgcaagccggcggcgtcgggaggcggaggagccgatgccgctctgtcggcctcagcaagggccgcaccggcaggccagatcactgaggagccgaaggagagcagtctcgaggacgaccttcggagcttggccctcggacacacagcgcccgagccgtcggcggcgaccaaggcggccgacgatctgggcggggctggcgtgctcctctgacggaccagttcttgccctccgcccttgtacctgctctgcctgcccttgtatacgtctccgacaccttcaacctctgccatgacccccttgacgaccgccgttcgaacggagcagcgagtgcgggtgttcgctcggagccgtccgccggcgcggctcgactctggcgcgggcgatgatgcgctacgattcgagcagctggcttcctgccttcttcctcgccctcatctctctctaccttcgtctctacagcaacagcttccgtcgcatagcggtcatgcggaaatctcccttcgtcatcgcgtgcgtcttcggtctcgatcttgcaggggtgccttgggtgcccgccgccagctgctccgcgccgagcgacctgagctgacaggccttggtccgacctgcctctcgaaccgatttcgcagcatcccggtccttctgacgattctcgccctctctttgacggcaatcttgcggcccgactggtgcgactctccgcgatcggtctcgatctctagctgcagccgcgagatgggagctgactggcgcgtgtccccttgctccctcctgccggcagggttgtctccacgccgccgtcggtcgacccgatcctacttcggcaggtcgagtacggtctctggcgcaagtgcaccaaggtcacgaagcggcacacgagcaactcgctgcttccctctgacgcaccgctcgtcgacgtgctcggcaaagacggcggcgagggcgaaggcggcaagcacgagggcggccacagcgatccggacgaaggctcgggtaaagaccctctccgcctcggtcaatgggtatgcgagccctttccggacgacaagggctcgtttggcgtactgtggtcgactgctggttacctgtgcgtccctcgtctgcccaccttcgactgcgcatgcaccatccctccagggaaacgctgacctttgacgcatcgcagggccatcatatcgctcattccacatctcgcgtcctgcgttgcgctgttcataatcgctgttggtctcggagagcgccaggtccgcaaggcgcggcgcaagcgcgggtggaagggcgtcgcagcatgttcgctcgtcgccggttcgtctccggccgaacagtctttcgctctgcaaacagacgctgacacaattctccttttgtcacgttccccgtaggcttcctccagattgctgcttttggcatcgtcgtgaacgttttccgcaccgacgacgcacgcttcgcgcgcgctcacggcgcgtcggcgcacctccgtgcgtcctactcccccagcagatcgtcgacgctcgctgacgcctctcttctcggccatatagacacgtcgacgatcctcattgccctctcggccgtcctctcggtcctcctcttcgtcgctctcacctacacgggcctccaggcccgggccggcaaggtttgggctggcggcatgagcgtccgtggcaagggcaagggcaagcatcggagccggagcgaccacagtcggcggtcgagcggccggcgtgttgcggacgagaatgcacctctgcttgaagagacgtcggccgcggaggaggcctgaggggcggcggcgccgaatcacatttcgatttcctctcactctcctgccgaaatcgatgccttctggtcccccttcctgagagccagtagcctcgtgcgagcttcaccccatccggttcactaaacaacagaaaatggtagagacgcgtcgcgtgcgcgctgccgccgcgtcgagagctgcgcgtccctgttcagccctccgccttctccctccacgtccaactgccttcctcaccctctctctatcacccaaatcaatctagacatggcgacgcggaccactcgaatcgctggcagctcaaagcccatctcgcccgtctggaagggcaaggcccggcgcgaggtctttgatgcagacgacagcgacgacgacgagccgaacttcacccggctgcttcccgcccggccgctttcaccgtcgcgctccgtttcacctagcaagcgcacatcgccgcccgccttcaagccaccggcattgagctcgagtcggccgacgctcgttgacctcgccggctcatcgagctcgtcgccgcctccgctggcccgatcggcctacaaagcctccgccatgacgggctccgcagcgaagcgcagcctgccttcctttgagcctcccgtccgcgtcactcgccgccggtcggcgctgacggcggcgcaagtcgacaatgtgccaacgcctccaacggcgccggtcattcgcaagacggccctcaagatgttccgctgggggaatcacggcagcaacccgagtatcgtctacacgacctctcgggatgaggtcgagcagctcgtcccctgcctgcgacctgggtgagttcctccagagcgtcgaaacaagcatcttgactgacccgatttgtctctcctggctcgtcaaaggccgctgagcttcgatatggagtggcccgtctcgtggggccggaagaaggagaataagacggcgctccttcaagtgtcggacggcaagattattctcctcgtgcagatatcgggtgcgttctgtcgggctttccctttgtcgagagacgaatctgacgcctctcctaccctcagctatgtactacaagattccgccggccctcctggccgtcatccagtcgccggaccggctcctatacggcgtcaacattcgtaacgatgcggccaagctcgcacgcgactttcctgcgctcggccggccacagggcttcgtcgatctatcgcatatcgcgcgcgagcttgaaccgacccgctggggcgagggacgacgtctgatctcgctcgccaagctgacggcagcgctcgtcggcgaggaactcgcgaagccgaaggagcggacgagcgactggcggaaacccttgacggagcgccagcgcgactatgcggcctcggatgttcagtgcggctgggcgatcctcgagcggctcaaggcactccatacgggcggtgctggcgtcgagagcgaggcttgggaggggctgctgagtcggctgaagggcgaggacgtgtagaaacttatgacttcgcactcgggtgatcgtcacgggctggcttgtgatcgacagctcatgagatgcaaagccgcctccgatcactcgtcgctcatcctgtcgtccgcgtcgggcgacggtgatgtcggcgcagcctctcccgccggcgcgccctcggcctcgtccgcgtcagagtcgtcgtcgtcgtcgtcgtcgtcgtcgtcgtcgtcgtcgtcgtccgagtcgtccgagttctccatgtcgagcaggccgccgccggccgacgcagcctgggcctgcttccaggcatgcgccatctggagcagcttgaaattctgcgggttggcctcgcgctcgtcgtcggggaagatcatgtcccagtctgagaagagcagagcagagagcgtcagcgtccgtcgaagcccgccgccagcgaggcaggcctgggcgctcagacttacactcctcgagcgcattggcgccgtcgtccgtcttgcgccacttcttcacgacacgaggcatcatgccctcgaccttctcgaggtcggcatcttcgccgtggaacgcctcgaactccttccaggcctcgagcaggacgacgcgctcctccttgagtccctccttgcgtagagcatcgtagccgcgctggaggaccttacgcgccagatccgggtcgccgccctcgccctcgacctcctcgcccgtgtcttcgtcgaccatcggctggacctcgaacagagcgtacgcgatccagaccttgacgtggccagtcttggacaggagagtctcgtaaagcgagcgagtccgctcccgctcctgctgcgagaactcgaagtcgatccatgcctgcgattttttttgcgcgcgagtcagcaggcaggtcaagtatgagagaatgaagggcgagctgcgcaccttccagagcacctcgggcatgtcgagctcctgggtcgtgccaaggtcaaagaggaagcgggcgcggtccatatcgatgaggccggcctcgagctgcgcccacttgacccaggccgccgtgttggaagggtcaaactcgaggtacttctggtagatcgtccggacctcgtcaaactcccagagctgcagcaaacagagctcggcgtcagacgatagtgaggaggatacagcagcctggcgagcatgcgcacctttgtccgcagctcgatgtacgccttgaagagcttctccttcgggcacatgccaatggccgtgccgagaatcttcttggccgccgtcatgtccttttgccggagctcaaagtaggcgtactggatccagagcttggcgaacgtgaacgaccggtggggcacgagctgaagcgcagccttgtagacctgccgcgcccggtcaaagtcctgtcaagcgcgagccctgggtcagcaccacccgcgacgccaggggcgccggccagagaaagatgagacggacagaggaagatgagacggaccttggtctcgacctcctcaaacgcagcgtagaagagccaaaggaagatgtagcgccgccagaagcgcttctcgccgccgggcgggacctgagcgaccgcccgctcgtagacatcgcgaaccttgtcaggcgacagagacgtatcccgatccgacttcaaagaccggtaggcgtcctcctcgagacgggcgtatgagacccaggcgtcctgaggcagcaggcgacaggcgctgtgtcagcctctccctcctcttccagcaggatcccagcaggatcgactggggcgcggagcaggacgcacgtagttattggcatcgtcagcgacctcctcctcgtactggatccgccgcttgccgagtacggtcgactcgacgccagccttgttgccgtgctgcttctcaaacttggtgaaggccgagtagagcgcctgcgatttgctccgcggcagccgctcgagcgcgaactggatgggatcaacggggagggtcaggtgaacgtgcaagtcagaagacgagctcaagcgggcgcaccttgtagatgacgcgcgctcggtcaaactccttcagccgagtctccatctttgcgaacgcggcaaacaccgactgagcgcgctcgacctcggcctccttgtcgccaaagaactcgagcgccatttggaaaacctcgcgcgccttgtctgagaggggcaacgggcaagcaaagtcgaaggcaggggcgaggggcgcagagaagggcgtcagcgcaggaccggatgcgggtttgggtcgttgcgcgacataccgagggctcctcgctcctcctcgaaccgggcccactcgatccagttcttgggctcagggtggcagccaatccagcgctcatggacggcgctcgcccgctcaaactcgttgtaccggagctcgagcttgacgtacgccttccacgcgcggtcgtcaggctcccacttcatccaccgctcgaagacctgccgggcgccgccaatgttctggagaagctcctcgagctggacgaatcggagccagaggccgtcgactcgcggcaggagcgtcaccgcccggtcgtagaggttgcgggcgtgagcaatgttgcgcgccttgagctcctgtagaccgtgagcaggagggaagcgtcagtcgctgagcacccaagaagagcagaggcgatggcagacagagcgacgtaccgtctcgcagtagtgaagccagagctggacatcagtcggctcgacgtcgagtgcgcgctcgaagaccgagcgggcgcggtcgaactcgccctggctggcctcccaggtggcgtacttgcgccatccttggagctgcgagcgggtcacagaggaagagagagagcagagagcgtcagctgatgtggtttgctgtcggtgcagctcgaagcggcggctcgacagctccgtagccatcttgagccgggccgctttgagctcgcagggaagagggtcagacgcactgccgttcgcgagtagcggatgcggtcctcaaactccttacgcttccggccgcggtactcgttgagctcctcaagatcctcgacgcgctggcgcggggcacggaaagccgggtcctgacgctcttgagcctgggaggggagggcgaggtcgcagagttggatcagcctgtgctctccgatcgatacgcgtagaacggcgagggaagtcgcagcctcagccagggaagggacgtacctcacggagcagttgctcggccgtgatctagtgggcgagagggagaagccgaggatggaagggcgagaagaacactggcgtcagagagcgtgtcctcgcggagcaagctcgccgtgggcgcagggaacgcgagaggacagacctggatggcggccggggcacggtttttgaccttgggggcgcggtcgccctgacgagatgccatcgtgccgacagagaggctgatagctgagaaggatgggagacgggtcgggaggaggttggaggtcggcgagatccagagtcggaggacgagaccaagggcggcggaggcggcggcgtgcgcgcgcgagagaaacggcatctgcagtcgactgcgtgccctacgtacgtgcagcgacgaggacgaccttgatctctcctgtcaagccgtactcaaaagggcgacgccgtgcagatactagatgcagccttgcaatcaactgaagggcgcgagtttcgcaagggtccatctatttctcgaataaatcaggctatcgtcttgaacgaccgggcgaccttgctgtgaacgccgcggaggccgacggtgacggcaacgatgagcgtcaagtcgacgaggaggagtgcgcagccggcgagcatgaagcgcggcgcaaagaccttccagaccatcaggtgccgccggtggacgccggcccaggtcgccgtcgcgaccgtcacggccgcctggtagaggccgaagccgagaacggccttgagcgcgtccgggaggacagggacgtggttccggacgattggtgagacgttccagctgccgaggagcggcgagaagagcgcgacaaaggcgagcgggccgagcgtgttgaggacgacgaggatcggcgagaaggggtacgtgagcgtcgggaagccgatgaaggccgagccccactggaacgaggtcaggacggcttggtggccggtcgcgtagaagacgaggttaccgacgagggcgagaattgacatctcggtgaacgacggcgggacgatcgtgctcatcgcggccgacgggtcaaagccggctgggtccgacgtgctcgcggcaaaggccgcctgaagtgcgaccgagtcccgctgcgagtcgacgacctcgaggtaggcgaggaggccgacgaaggtgagtgcgagaacaaactggccgctcggctgggcgagcagccagagcgtcgcaaaaagcggcaggaggaacagcaggtacgaggcgccgtacgagttggcgaagccgaggacgacaatctggcccttggccggcttgggcggcgcgagtgggttgtcgctttccgggtcggcgagtcgttccttctcctcgtcgtcgccggcgcggcgaacctcgatacacggcggactggcgtaccagcaggccgagagcccgccgacggaggcgaggagcgtcgcccgggcgagccagaccttgatcagcttaacgagcgggatccggtctgggttaagcccgcgccaggtctcggcgcggtcgagcacccagtaaagcgtgccggcgaggaggacgaggcgaagcgcccggccgaggacgaacggcgccatgccggcgtacgacttggagatgccgaggaagagcgagagaacgactgggaacatggacgccagcggaagagctagtagctggacgaccgcgggcgagacgggcacggtcgcgccctcgtagaaggtgacggagcagtcggccgacgtctcctcacggcagatcgtcgagacggccataagccggaagcaaacgagcgcgagcgcgctgaagccgatgatgcggatccggagcggcgcactaggagcgccgggtgcctggcagagcgcgaggacgagggcggtcgagaggaagtagagcgagatgcggtcctcccagaggatgaacgagttggtcgagaggccgatgacgtgcagactgagcagcgcaggaccggcaagtgctgctatgccccggctgcagccatacatgagcctcgtcttgagggccgtcgccgagtcgaagaagttgggcagaagaatcgcgagctgcgagacaaaggcggcgtaccagacgatagagtcgagcagcgtgacggacgactcgcggccgacgacgccgttcatgacgggcccaagcgtgccgacgatcgcgccgccgacggaaccgatgacggcatagccgaggttgcgctggacccacgtctcccagccggaccggtggcgggcgacctccatgtagacgacccaggccgtcgggagcgacaagaggaggatcgccaggccgccgagcattgcgagcaagtcgaactgcgcccagattgcgcggcactgctggagggcggcccgcgtgaacgatcgataggcctcgagcagctcggccgaaggcctggctgttgcgtcgtggccggcccagccagccttggcctccagtgcccggaggacagcgtgcttgcctttcagcaagcccatcgcccggctgagcgctccaccagctgaggaggtgccgtaacgctcgaggtacttccaaatctgagaggagttgagcttcatggcgcgggcgagcaggctctccgacgcaaagagctccgggatgacagagcccaggttgttgaatggcacgggaaggccaagcaggagcgagagcgtcggcacgaggtcaatctgctgaaccgcccgtgcgctgttcaagaccgcaccggggaacgtcgtgcgctcctgaagcgcggttggcacgccggaccggaaagctccggcctgcttagtgtagacccagagcgcggacgaggtctcgaggatgccctcgccaccgtggtcgcccttgcggtccatcccgtggtcgcccatgacgacgagaaccgtccgctcgtcgagcgcggcgactgtctgccggaggaaggcgtccatctgggcgagcttggccgtcatgatcgcatgcgaggggccgagccggtggccgacgtggtcgacgccgagaaagtgaccaacgaggatgtcccactcgccgtgagcgccagccataagcgccggcaggtgcttcgtcacgccattgtcgaccgagtgcaggtcctcgacgttgaacgagtcaaaggggaacgacatgttggcctcgaacgaggcagggtagaccgagagccacgtctcgtcaccaacaaagccgatgcgcttgccggccgaccgggcctgatggatccaagagtcctcgtcgatggccgagcctgcaaagttggaccccatgtcgatgaaggtcggcagcgagccggtcgtgatgcccttgagccgctggagcgtcgtcgtcggcgggtctgcatgggcgttgaagatgacactctgccccggttgggctgccgagagctcggccgggagggtaagaacgccgtgaaagtgctcggagcggtcgacgggcgaggccgacgtgggtgcgagaaagtcgaagcgaagcgcgtcgatgatgacgacgacggccttgtcaaaccgagctgggagggagcagtccgggtcgagaattgagcacgagttggtctcctctagcgacagccgggtcagaaggaagcctttggtgaacaggtagactgcgacgagatcaagaggagagacggtcgtcagctggtgagctcgaaaagcggacgacgccgaatccgccagaggcagaaagggcgctcgacttacgtccagaggcatgcaggtaaaagatccagacaagcaagaggaccgccagcgtgtgcttgcggacgcccgagagcatgccattagaaccgttggccatcgtgctgagcgagagcgagagcaggagaccaggagggtcaggagcagtcgggcgagccggcgtcggcagcgcagccacggcgtcaaaggcccttccgtcgaccactcacgtactgaacgttgcgagaggatggaggacgtctgtccgttgaccttttcttcgttttccttgccgttcgagtcgatgagggtgagagtcaagaggctgacggggtcgagttcggcagccgcctctctccgcgcttgcactgcgcttgcgagaggccttgcgcagcgggcccgtcgcttcgactcgaccttccaacagcctccctctccctccgacttctgtcagactagaccatcaagcagacctcgtcagtgacaggcaagcatggtttttcattcgacgccgacgggagcgaccgacgcctcgtcgtcctttgggcttctaatgaaggtcgtcggctcgctgcacgacccctctgcgccatttgacccgaggtcggcgcacgatctcgcccagctctcgaccaacaggagcgttctccagggcctgcagcagcagttccaggtacatcgtgctcgctcctctttgcctacatcttcgccttgctcacgggctcaagccgctcgcaggtcaacgcatctacgacctcccggcacctgatcgacgcggcgtgcgaccccgaagcggtaccctccgaggtccgcgacttctgggtgacttacctcgacgaggcgcgctcttacgactcgcgagactggtggaagaactggtcgcacggcctacggacatggaagtgagcccctttcgcaccgccgacaccatgagctcgagcccgagactgaccaccgcgtcacagagcactctacgccgcctttctctgcccggtcggccacaagtacgccgtcctccttggagtcatgtccaagcggctcatccacatcgctgccagtgtgagctgtgatgccttgtatctgtcgtgcttgcctcgctcaccatctcgccgacccccgtcgcacgcagcaagagaccgacgtcatgcgccgtcgcgcgatgaacgagttctaccagccgatccgggacgccatgacccagtcgctgaaagacacgtcagtctggttctggcccgcacctcagctgaaggtgttctgctgatcacctggtcactcgcccgcacagttcgacaaagctctcgacgcgtagagacgccctcttcggcctctccatcaccctctttcgtatcttctttcacctccagacccaccaactgtctgctcagatcgtccagctcatcagaccgcatattgccaagctcggcgcgacctacttgtacgagggccagcagcaccgcatgtacagcaaggccgacgaggtcgagtttcgtttcctcctcggcgtctactacctcggtcagcggcgcatcttcgaggtccgttgaaaagcttgagctatcgcgtcggagaggccgacagctgacacaaacttggtcgtcgcccggcttggcaggcgcacaaggaatttgagcgctcgtttgaactctgctcgcacagggtgtcattcaggaatcgccgcctgatcctgatccggctcacgacgacatcgctcctgcttggcacccttcccgcaacgtctctgctggacgcctttggcttgcgcgagatgttcgagccgctagcgcacggcatccggcatggcgatttggcgacgtaccgccaggcgctcggcgtcggctctgggccagacgcgcttgctcgggcagagcacttccgcaagttcaaggttctcggcatcctgcgcgaaaagggcgaggtgctcgtttggcggagtctcctgcgcaaaacgttaggccggccgcttcgcttctgaccctcggcgcatgctgaccttccaacgaacgctgctccgccagcctcctccttcaccgcaaaaacaacaatattacctccgatcgggcgacgctaccagtctcgcagttcttggcggcgcttcaattcgtcaccagggacccgtcgtacgacctgcaggacgccgagtgcatctgcgtctccctgctggatcaggtccgtcccctatcgcctctctccctccggcttgtggtttgattagaggcagtctgacgtcttcctttctctgcgttccgagcagggcttcttgcgggcgtacattgtgcactcgagccagatgctcgtcttctcaaaggaggcagatatgggcttcccgccgatagcgaaggtccggatgcgatgacctatcccctctcgcttctctacagacgactcgtcagaaagcaaatgagtacagcctctctatgagtctaccgagtgacgaagcggttgggttgcccggaggtgagacgaacgagcgccgaggtcggcgcagggtatgtggtcgagcaagcgggcgagaggctcctacttcttgtttgcctggatcgagaggtaggtgttccaggggctgtgtgtgagagtagaacccgagtcagcgcgaagcaaacgtctcatggcggaagaaggcggcgcacatgttgacgaggttgattgttaggagccggtaagccggcgggacgaccgaaaagttgatcgcctgggtcgggatgaagacaccccagttggccttgagcgttgggaggaggtcctgagggaagagaagaagatggcaggtcagcagggtggcggcgaaactggaagtgccggtgaggcgggtgcggctgcgcggccaggaggaacgagaccgacgttgcgtagcttgtgccggacgctgccgaggtccttgccttcagtcaggctcataaatgcaaagaagccggtgacgacgacgggcgcgcagaggaactggtcgagcgcgacccgggtggccgtcgtcgcaaccgtgtttccgagctggaccttctggaggaccttgaaccactgggtgatgaccggcgcaaagatgccgccgccccagacgacgatccggccggtccgcacaaagtcgtgtttgctcccctgagtcggagagctggtcagcagaggcgggaagacaacaccgctgtcggaccagacagaccttcttctcgacgagctgctgggcgatacagtcgccggtcgcgaacagcgcctgcgcgcgacgtcaggcaagcgaaaatgtgagccgcagcagccagcgcgagggctccagggccagcaggacgtacggcggccgagacggcgttgccgacgagaggcgagcgggcgaggaagcgctgataggatgcaaggaggccggccatggtggggagaaagctgtcggagggaaggagagctgtcggctcggctcgaaacttgggcggccggacgaagccgctcagccggcggcgccattccagttgcgccgaggcaaccttctcttctacatcgggcctgtcctccgtcttgcatcgtgacgtcggtcagccgcagcagcctcagctctctgccgaccttgttgccaacgacgaccatgccgagcgtccgcttcacgaacctgaccgaccggccggtcaatgtctcgctcaagcagctgacagccctgcatttcgaggtgcgcggctgcttccctgggacccggcttggcagcacggcctcgctcggctgacgcctgacctgccctctcccttccgcatgcgcagaatgaggtcgcgccagggcagacggtgaagatgaaggtcagacctggtcagagaccgctcagtcagtatccgttggccttccgccggtcaactgctgacagacgctggctcgccctcgccgttgcttccgtagccgggcaaggtgtggttcaccctcgaggcccttgtcgacgatggcaccaaccgctactcgctcaccaagagcgctgcgacgatcggcatcatctcgttggccgtcggagtgactgccgtcaccgctggagccgccatgctgcctgaggtcgcggtcctctcggcggtacgtctatccctaacacattaggtgtcttcttcccgtctgagcctcctacgccgtcgcagatggctgccggcacgtcgtctgccgtcacccctgcgctgtccaagttcgccctcgccgccaaatcggccgtcatttcgcactctggcgtcatcagcaagctcacagcgacggccatcccgaaagcaattgcggctttgacgtcctccctcggcggcatgacggccctccaggccgaggtgctttcaatcctctcgtcgccgctgacgccatcctcgctccgggctagggggatgcacatcctctctggccttcggcgggcgcatgccgccgacaaggcgcggactcaagccgagcgggaggaagacgagcgggcggcacttgagatggagcagcaggccgagcgcgaggagcgcgagggcaaggacgtcaaagacgagaagacgggcgaggtccggagcgtcggcgtcactgaagggagcggcgtccgcgggcgatcctacgtccgcaaacacggagtgtacattggccagcgaaagcactacgaggtgcgtgccgacgttagctgtcccctttggcccggcgcatgagctgatgccggtcgtactgcgcagattcgcatgcagggcctgtcgctcggcatgtgggagccgtcgtcagagaccttcctcacatgatccgctctacatagaactttgatgacctactcacgaccctccgcctgatcaaacgatgccatgctgctctctctcgtatgaacgtcggcccgcggcgaaggaaagcccggcccggcagtcgcgtgcagtgacggcgatcgccgagcctccgcgcggttcgtctcctcgctcctccttgcgccgtctctcccaacgacctgtcgctcccaacgacgaccctctcttcgctgctcaaatctctgttgatctacaggtctctgccgtaccctctcattctctcgagccctcgacgcctcctcttcgcactcctcgacccgaacctcggcccgacgacacggtcatgctcgacacgaccaccctccatcgcaacttccctgctctcgccgacggcttcatctatgccgacaatgccggcgggagccagtgtctccagggctgcatcgacaacgtcgttgagtacctgaccaacagcaacgttcagatgggggtgagctcgatctgcaagcccggcctgggacccttttgacccgacgctgacgcccggcgcctccttcctgacggcagggtggctacccggtcggaatcaagagcgaagccgcgtatgctgagggctttgacgccgctggtgcgtccttgtctgaggtctgcgagctcgcgcttggctgctgacgccagcccggtgtcccatcttccccggcctccagcgaccttcatcaacgccgcttcgccgaaggacgtcgtctttggcagtagcacgacagcactctttgccaatctcgcgaacgcgctccggctcggcggcaccatcaagcctggagacgagatcattgtctgcgaggccgaccacgaggccaacgttgggccgtgggtgcggctcgctcgagaaatcgggtgtgagctgaagatatggcgggtcacgggcgatctcgccggcggagcgaacctcgagctcagcaagcttgaggaggtcgtcggacccaagaccaagatcgtagccttcacggcctgttcgaacatcctcggccaatatacgccgatccgcgaggtcgtcgagctcgtcaagcggcgctctggaggccaggccaagacggtcctcgactgcgtcgcctatgcgcctcacgcaaagctcgacgtccaggcctggggcgtcgactttctcggcttctcctactacaagtgctttgcgccgcacgtttcgcttctctacgtcgcaccggcggccaacgacctgctggcatcgctcggccactactttcacccctcggccccgtcgtacaagctcgccccgggcggtgcctcgtacgagctcatctactcaaccgccgccgtcctgccctacatcgcctctctctcgggtatgcccgactcggcccctttgcaggagcgaatctcagccggctggaccgcggtccaagcgcacgagcagcttcttggcgagaagctgctcaactacctgacgagcgatgcctcgcgtgccaagggtgtgcgcgtcattggcccgcatggcatgggctcagatcagggccggagcgcggtcaccatctcatttgtcgtcctcgccgaggggtcggtcgagccgaccggcgtgggccaaatcaagaagcggatccagagcaaggaggtcgtcggccggttcgacaagtcgggcaaggtgggtcctccaactgacgatctgaccgagacaccggctgaagactcccttccatctcgtcgcaggctggtatcaagtacggccacttctacgcgacacgattgctcgcctcgctcggcatgggcacggtcgacgagccttgcgccgacggcgtcattcggatcagccttgtgcactacacgacgctcgaacaggttgacgagctcatcgcgatgctcgacgaagtcctctgaatgctcatgcggatcactcgaccactccggctttgcttccaatccaccgccggacggccttgtcccagcagccgccgttgtcgtcgagcgagaactgcatgtgctcgccgtcgcaccagccaaagtgaagcttgcctgcctcgtcgagagctttaaggccgatccagtcttcgaggtagagctgtgacccgcggagagggatgaccttgtgggccggcttgcctccggtggcatcgaccggcagcggccgaagcgagccaaagtgcgagctgaccgccggcacgacagtcgtctcgttcgagaactggagcatgacgaaattcgacagacttcgcaagttgtccttgtacgaggcgtctttgctctcgatctcgttgttgattatcgcgaggaagctgggaagaggcggagccagcaccaagtcagtcggctgctctcgagcgcggcgcagggtaaggagaacgcacgtgttgctctcccgatagaggtcaagcctttcctggtcccggaagtactgggcctatgcgatccagagtcagtctcacaagcgtagtgcagctcccgccaggagcgtgctcactcacctgcactagggacgtctgagcatagcgcgagtagacgccgcggaaggctgcggagcgagcaagcttgcagaggagctggcgagggcacgggacggtcaaacgtacccatcagcatggcgagcggtagattgtctcgatagagcagcacgcacatccttcggagaacactctggcaggtccgagatgcccatgtgttgcccgccgaaggtgatgaggttgcggatcggagcgccgcgcagctcaatcagcccgcgcaggaactggccgccctgcgagaagccgatggcatcgtactggttcggccggagaaggggtatgtcaagtcagccgtctgcgacgaacgccaggcggggcggctcgtttcgacacggtatgcgacgccgaccacagctgaagggagaggagctacgcaccccgtggtcgaaggtcggcatcgcctcaatcaggtcggcgacgcgctcaatctgttcattgacgttgccgaagaagccggccttgcggtcgtctttgctgacgcagaggttgaggacgctgatgccagggtagcgacgctccaggtcacccttgatcgtcagctggtgttggcgacgagtgcaggccggcctcgcttggttcagcttagacctccctcctactccttcagcaacccaaaggcacgcaccatgccgtccgagttgcagtcgtctccgagaccgtgccagatcgcgaccggcctatacttggaggattcaggctcatcgagctcgttgagccggagctgcgcgaccggcggagagagcaagtcggcagcgccctgccagacgaagggtgccgcctgcccgaacgcagccagcgcggtgagagcgaatgagccgaaggagacgcgcatccttgcgagatgcgatggagagtcgagatcggaatgagggacagacagcggagcggcgacgagccggctgagactcgtcggctacgacgaccgtggacgaccagcagcgcgtcggcactcgtactcgtcggcactcacttgcaatcgtcaatgcgccagaacaagcggtccaccctatgaagcttacaggtccggcacagagatgtctgagtcgtctttatacatgtacaacaggctagagtgaccgacgaagatgaagcaggtggagggaggtggacgacaagtggcacggggggcagcgatgacacgtccttatgcgaactgcgaaatgcgaaccggcgtcagcagaaattcgacatggcaagggaggccgcctgggagactcacgcgagtgaaggtgccccgcgtcatatagttgtcgtcctccttttcgcccttcttcttgtacagcgactggacagcggcgctcatgccagccttcttgcgctgctcctcggcgtccttgaggtccttgctgaccgccttggccagcgcttgagctcggctcggctcggcagtaggcgctagcggcttggctgcgccctcagtcgcccgactcttcttgctcggctcgtcctcgcccgcagcggtcgacttacgtttcttgcccttcttgcatgccttggcctcggcctggttaagtgcgatcgcgatccgcatgtccccctgaagcgacgccggcgggttgatgtagatgaggtccgacgcgagcgccttctgggcgacgacggcgccttcagccggcgtcatgtcctcggtcgacttggcgccctggaaggtcgggttgaatggcttaccgctcgtcggactgagcgccacgcgcgaggcggccgccttgtccttgtcggaagctgttggtgcgtcgtcctctggcggaggcgaggggaggccgccagacatcgcgtccttcgtgacggccttcaggcccgcctccgaaaagacgtcgcccgaggtccggatcgcaacaaaggggatcaggccgttggcctcgcgctgtgtcagcgggcagatgaagagcggcgtcggcgcctgggtgtcggtcgtctcctcctgcttgctgtcggcggcgagcttggggttcatcgttagattaagcgtgacgaggtcctacgaggacgaggtggccaggcgtcagtccatgtgcactccttctgcggacgcgctcgactacctgtcgctcagcagctcccgcctgcaggcggcatacgcaccttcatcgacttaacgtgcccgcagatcgactcgccgtcaccaacagacgaccgatcgaggaggaactcaaggatggcgtccttgttgtacatctttccgattgagtcgagaacgattggctcgcgtagcggacgctgaaggtagataggggatcgtgagttagcagggagaccacagcagaaaggttcggtgcgaaaggcgaagcggaggtggcgaccgaccttggacagggcgcacagcagccattgagcccggcggatgttctcgccgtccgtcacggtcgcccgtgtcttgttcttgacgagatctctccggtcctgagagcaaagcgggcgtcggcctgtcagtctgagcgtcctgactgcttcgggcgagctcgagggcgcgctgctgcggttggctcactgggatggatcctccgtcggctctggaggcggaaggagaaggtcgagtcagcatcgggcgccttgtgcgggattgctgatggccgccactcaccccatgatggctcagtcaaagtataaggtggcggaagggttggtccagggcgagacaccgtcgtggttgggagggtccggagaagcagcttgccctcgctcatttcgtgtcatctgccctccaacaccctcctcgtccctctcaagcttctagcgcaatggccgactctgacattcctggatcctctgcgccgaaggagacgcagctcgtgtactgtggaggtgcatcttgagcgagccttagcgagagcgctggacgaccactcggccgctgctcgacctgacgaccgacgcctctcccttcgtcctgccagtctgcacgtggccggccgagtactgcgagttcaactcgaagctgtccaagtgcaaggcctggctcgaggacaagcacccgtcgctctacgacaagtactactctgatggtctgtcgtcgaccgtccctgccgccgcgcttgctgctcggcgctgacgctctcgctctgttggctccgcagacgccctcaaaaataagatgggcacgctcagtctcgacaaggagaagaagctcgaggccgatgtcgagaaggccgagaagaaggctgagcgcaaggccgccaaggaggaggagtcaaagaagagcctgaaggtgcgtttgacatcgccgccctcagtcctccgcaggcctggccttcctgacgcgacgtcactcgtacctggcaggtcacgatcgagcgggtcgagcgcaacaagcgcaagtacgtgacgacgatccagggcctcgagctctttggcgttgatctcaagaaggcggccaagatgatggcgagcaagttcgcgacgggcgcgagcgtcaccaagaacccacagggcatggacgacatcaccgtccagggcgacgtctcggacgaggtcgtacgtacgagattgcgctcgttcagtcgcgtgtgcgcgatagtggtgctgaccttgcgacaatgtcccgtccgctacgcaggccgacatgctcacgaacccgtccaagaaggagaaggacgtcttcggcgacgccggcatcccggacaagtcgatcgaacagatcatcaagaagaagaaggagaagccgctgcccggcacgctcggcacctttgtcgcatagagcgcgaggcctgaaggatagatggctgttcgctagcggccgccctacatcgtgcactcgtcatgacgacgccctcccgaatcctgtcagggagcctcatcatatttcggccgccggcgtcgcccgccagcagcgccagccccagacggtcccgcggaccttttcgtccccgcggtcgtgctcaaacattgggcccgtccactcctccttgatcgtctcgctctcccagcctcgtgtgcgggccatgtcgaagaaggcgacgtcggcctcggccagatggggccggtggtgcgtgtagaagacgaggagctcggaccgctcgtgcgccgtcgcgttgcacgtgtcgagcagggccgcgtgctgcgagtggttgaagacctggcgcaggaagaaggagccgagaccgtcaggtccagctgacaggatgcagagcaaccagaagtagtacgtacgagatcagagaggatgatcgtgtcaaagcgctcgtccgctgcggggaggcagtcgagcatcggttggacgttcttgccccagcagtggccctgcagacgtgggagcaggacgtcagcttcaccctcctcccattgcatgaggtggagagaccagagcgtaccatgacgtgcgcgtttgcacgctgcgattccggcacgttgagattgacgttgaactgcatgttgtcgatcaggacctggtccgggtagtcggtgatgacggtctgcgcatctcaaaaacaaatgtcagcgagctggccgatcagcacaacaccagtcattagaacccacagtcgcagccccagagagcgccgagatgattccgggcagcgctgcagaaggaggatcgctgtcggtcaggtcgggctggaaggcgacgtcgagcgcgcaagtggtgctgcggcagactgaccgccagctgcgccgagctcgagcaccttcttgcccttcaagcaagtgtcggcattctcaagcaggtaggttgcaaagacccgcgccgcgttccagaggtgctggcctgaaggaggtactgacagtcagccttgacagaccaacgcccagaccgtcgaagaggctcactcaccccagagcggatgctcgccaacgagccggatcgacagcttctgccagtctgctgcgggtagctctgccggccgagtgtaagaggcgaacgtaggcggcggcgtggctggacgagcctgctcctgcgttcggcaagggttgaggctgaggtcagcact

(The sequence listing continues in the following parts.)

1. A method of treating soil, the method comprising providing the soil with a glucosinolate-secreting plant or a source thereof and contacting said soil with a myrosinase-secreting yeast of the Cryptococcus genus or a source thereof.

2. A method according to claim 1 which is a biofumigation method.

3. A method according to claim 1 wherein the glucosinolate and myrosinase interact to form an isothiocyanate.

4. A method according to claim 3 wherein the isothiocyanate is selected from a group consisting of: benzyl isothiocyanate, isopropyl isothiocyanate, methyl isothiocyanate, 1-napthyl isothiocyanate, 2-phenylethyl isothiocyanate, phenyl isothiocyanate and propyl isothiocyanate.

5. A method according to claim 1 wherein the glucosinolate-secreting plant is of the order Brassicales.

6. A method according to claim 1 which is a method of combating a pathogenic infection in the soil.

7. A method according to claim 1 which is a method of combatting pathogenic nematodes.

8. A combination of a myrosinase-secreting Cryptococcus yeast or a source thereof, and a glucosinolate-secreting plant or a source thereof for treating soil.

9-12. (canceled)

13. A seed of a glucosinolate-secreting plant comprising a coating, wherein the coating comprises a myrosinase-secreting Cryptococcus yeast or a source thereof.

14. The method of claim 1, wherein the myrosinase-secreting yeast is selected from Cryptococcus macerans and Cryptococcus oierensis.

15. The method of claim 1, wherein the myrosinase-secreting yeast has the SEQUENCE ID 1 or the SEQUENCE ID 2.
